(19) United States
(12) Patent Application Publication
(10) Pub. No.: US 2025/0320494 A1
(43) Pub. Date: Oct. 16, 2025

(54) INHIBITORS OF EXPRESSION AND/OR FUNCTION

(71) Applicant: E-Therapeutics PLC, London (GB)

(72) Inventors: Alan Victor WHITMORE, London (GB); Julie BORGEL, London (GB); Amy MCCARTHY, London (GB); Graham CRAGGS, London (GB); James LONGDEN, London (GB); Ines DE SANTIAGO, London (GB); Duncan BROWN, London (GB); Ahmad Ali MORTAZAVI, London (GB); Viviana MANNELLA, London (GB); Muthusamy JAYARAMAN, London (GB); Alexandre DEBACKER, London (GB); Adrian MOGG, London (GB)

(21) Appl. No.: 18/869,034

(22) PCT Filed: Jun. 1, 2023
(86) PCT No.: PCT/EP2023/064754

§ 371 Date: Nov. 25, 2024

Related U.S. Application Data
(60) Provisional application No. 63/369,634, filed on Jul. 27, 2022.

(30) Foreign Application Priority Data
Jun. 1, 2022 (GB) 2208122.8
Feb. 6, 2023 (EP) 23155114.4

(51) Int. Cl. C12N 15/113; A61K 31/713; A61P 7/04

(52) U.S. Cl. CPC C12N 15/113; A61K 31/713; A61P 7/04; C12N 2310/14; C12N 2310/315; C12N 2310/322; C12N 2310/351; C12N 2310/3521; C12N 2310/3533

(57) ABSTRACT

The present invention relates to inhibitors, and compositions containing inhibitors, and uses of the same in the treatment or prevention of a disease related to a disorder of haemostasis, such as haemophilia.

### FIELD

[0001] The present invention provides inhibitors, such as nucleic acid compounds, such as siRNA, suitable for therapeutic use. Additionally, the present invention provides methods of making these compounds, as well as methods of using such compounds for the treatment of various diseases and condition

### BACKGROUND OF THE INVENTION

[0002] Inhibitors, such as oligonucleoside/oligonucleotide compounds which are inhibitors of gene expression and/or expression or function of other targets such as LNCRNAs, can have important therapeutic applications in medicine. Oligonucleotides/oligonucleosides can be used to silence genes that are responsible for a particular disease. Gene-silencing prevents formation of a protein by inhibiting translation. Importantly, gene-silencing agents are a promising alternative to traditional small, organic compounds that inhibit the function of the protein linked to the disease. siRNA, antisense RNA, and micro-RNA are oligonucleoside/oligonucleotides that prevent the formation of proteins by gene-silencing.

[0003] A number of modified siRNA compounds in particular have been developed in the last two decades for diagnostic and therapeutic purposes, including siRNA/RNAi therapeutic agents for the treatment of various diseases including central-nervous-system diseases, inflammatory diseases, metabolic disorders, oncology, infectious diseases, and ocular diseases.

[0004] The present invention relates to inhibitors, such oligomers e.g. nucleic acids, e.g. oligonucleoside/oligonucleotide compounds, and their use in the treatment and/or prevention of disease.

### STATEMENTS OF INVENTION

[0005] The invention is defined as in the claims and relates to, inter alia: In one aspect, the invention relates to an inhibitor of expression and/or function of ZPI, wherein said inhibitor is conjugated to one or more ligand moieties.

[0006] In a further aspect, the invention relates to an inhibitor according to the invention, wherein said inhibitor is an siRNA oligomer.

[0007] In another aspect, the invention relates to an inhibitor of expression and/or function of ZPI, wherein said inhibitor is an siRNA oligomer.

[0008] In a further aspect, the invention relates to an inhibitor according to the invention, wherein said inhibitor comprises an siRNA oligomer conjugated to one or more ligand moieties.

[0009] In a further aspect, the invention relates to an inhibitor according to the invention, for use in prevention or treatment of a disease related to a disorder of haemostasis, such as haemophilia.

[0010] In a further aspect, the invention relates to an inhibitor according to the invention, wherein said one or more ligand moieties comprise one or more GalNAc ligands or comprise one or more GalNAc ligand derivatives.

[0011] In a further aspect, the invention relates to an inhibitor for use according to the invention, wherein said one or more ligand moieties comprise one or more GalNAc ligand derivatives.

[0012] In a further aspect, the invention relates to an inhibitor for use according to the invention, wherein the target of the inhibitor is ZPI.

[0013] In a further aspect, the invention relates to an inhibitor or an inhibitor for use according to the invention, which is an siRNA oligomer having a first and a second strand wherein:
[0014] i) the first strand of the siRNA has a length in the range of 15 to 30 nucleosides, preferably 19 to 25 nucleosides, more preferably 23 or 25; even more preferably 23; and/or
[0015] ii) the second strand of the siRNA has a length in the range of 15 to 30 nucleosides, preferably 19 to 25 nucleosides, more preferably 21 nucleosides.

[0016] In a further aspect, the invention relates to an inhibitor or an inhibitor for use according to the invention, wherein the second sense strand further comprises one or more abasic nucleosides in a terminal region of the second strand, and wherein said abasic nucleoside(s) is/are connected to an adjacent nucleoside through a reversed internucleoside linkage.

[0017] In a further aspect, the invention relates to an inhibitor or an inhibitor for use according to the invention, wherein the second strand comprises:
[0018] i) 2, or more than 2, abasic nucleosides in a terminal region of the second strand; and/or
[0019] ii) 2, or more than 2, abasic nucleosides in either the 5′ or 3′ terminal region of the second strand; and/or
[0020] iii) 2, or more than 2, abasic nucleosides in either the 5′ or 3′ terminal region of the second strand, wherein the abasic nucleosides are present in an overhang as herein described; and/or
[0021] iv) 2, or more than 2, consecutive abasic nucleosides in a terminal region of the second strand, wherein preferably one such abasic nucleoside is a terminal nucleoside; and/or
[0022] v) 2, or more than 2, consecutive abasic nucleosides in either the 5′ or 3′ terminal region of the second strand, wherein preferably one such abasic nucleoside is a terminal nucleoside in either the 5′ or 3′ terminal region of the second strand; and/or
[0023] vi) a reversed internucleoside linkage connects at least one abasic nucleoside to an adjacent basic nucleoside in a terminal region of the second strand; and/or
[0024] vii) a reversed internucleoside linkage connects at least one abasic nucleoside to an adjacent basic nucleoside in either the 5′ or 3′ terminal region of the second strand; and/or
[0025] viii) an abasic nucleoside as the penultimate nucleoside which is connected via the reversed linkage to the nucleoside which is not the terminal nucleoside (called the antepenultimate nucleoside herein); and/or
[0026] ix) abasic nucleosides as the 2 terminal nucleosides connected via a 5′-3′ linkage when reading the strand in the direction towards that terminus;
[0027] x) abasic nucleosides as the 2 terminal nucleosides connected via a 3′-5′ linkage when reading the strand in the direction towards the terminus comprising the terminal nucleosides;
[0028] xi) abasic nucleosides as the terminal 2 positions, wherein the penultimate nucleoside is connected via the reversed linkage to the antepenultimate nucleoside, and wherein the reversed linkage is a 5-5′ reversed linkage or a 3′-3′ reversed linkage;
[0029] xii) abasic nucleosides as the terminal 2 positions, wherein the penultimate nucleoside is connected via the reversed linkage to the antepenultimate nucleoside, and wherein either
   [0030] (1) the reversed linkage is a 5-5′ reversed linkage and the linkage between the terminal and penultimate abasic nucleosides is 3′5′ when reading towards the terminus comprising the terminal and penultimate abasic nucleosides; or
   [0031] (2) the reversed linkage is a 3-3′ reversed linkage and the linkage between the terminal and penultimate abasic nucleosides is 5′3′ when reading towards the terminus comprising the terminal and penultimate abasic nucleosides.

[0032] In a further aspect, the invention relates to an inhibitor or an inhibitor for use according to the invention, wherein the reversed internucleoside linkage is at a terminal region which is distal to the 5′ terminal region of the second strand, or at a terminal region which is distal to the 3′ terminal region of the second strand.

[0033] In a further aspect, the invention relates to an inhibitor or an inhibitor for use according to the invention, wherein the reversed internucleoside linkage is a 3′3 reversed linkage.

[0034] In a further aspect, the invention relates to an inhibitor or an inhibitor for use according to the invention, wherein the reversed internucleoside linkage is a 5′5 reversed linkage.

[0035] In a further aspect, the invention relates to an inhibitor or an inhibitor for use according to the invention, wherein one or more nucleosides on the first strand and/or the second strand is/are modified, to form modified nucleosides.

[0036] In a further aspect, the invention relates to an inhibitor or an inhibitor for use according to the invention, wherein the modification is a modification at the 2′-OH group of the ribose sugar, optionally selected from 2′-Me or 2′-F modifications.

[0037] In a further aspect, the invention relates to an inhibitor or an inhibitor for use according to the invention, wherein the first strand comprises a 2′-F at any of position 14, position 2, position 6, or any combination thereof, counting from position 1 of said first strand.

[0038] In a further aspect, the invention relates to an inhibitor or an inhibitor for use according to the invention, wherein the second strand comprises a 2′-F modification at position 7 and/or 9, and/or 11 and/or 13, counting from position 1 of said second strand.

[0039] In a further aspect, the invention relates to an inhibitor or an inhibitor for use according to the invention, wherein the first and second strand each comprise 2′-Me and 2′-F modifications.

[0040] In a further aspect, the invention relates to an inhibitor or an inhibitor for use according to the invention, which is an siRNA, wherein the siRNA comprises at least one thermally destabilizing modification, suitably at one or more of positions 1 to 9 of the first strand counting from position 1 of the first strand, and/or at one or more of positions on the second strand aligned with positions 1 to 9 of the first strand, wherein the destabilizing modification is selected from a modified unlocked nucleic acid (UNA) and a glycol nucleic acid (GNA), preferably a glycol nucleic acid.

[0041] In a further aspect, the invention relates to an inhibitor or an inhibitor for use according to the invention, wherein the siRNA comprises at least one thermally destabilizing modification at position 7 of the first strand, counting from position 1 of the first strand.

[0042] In a further aspect, the invention relates to an inhibitor or an inhibitor for use according to the invention, which is an siRNA, wherein the siRNA comprises 3 or more 2′-F modifications at positions 7 to 13 of the second strand, such as 4, 5, 6 or 7 2′-F modifications at positions 7 to 13 of the second strand, counting from position 1 of said second strand

[0043] In a further aspect, the invention relates to an inhibitor or an inhibitor for use according to the invention, which is an siRNA, wherein said second strand comprises at least 3, such as 4, 5 or 6, 2′-Me modifications at positions 1 to 6 of the second strand, counting from position 1 of said second strand.

[0044] In a further aspect, the invention relates to an inhibitor or an inhibitor for use according to the invention, which is an siRNA, wherein said first strand comprises at least 5 2′-Me consecutive modifications at the 3′ terminal region, preferably including the terminal nucleoside at the 3′ terminal region, or at least within 1 or 2 nucleosides from the terminal nucleoside at the 3′ terminal region.

[0045] In a further aspect, the invention relates to an inhibitor or an inhibitor for use according to the invention, which is an siRNA wherein said first strand comprises 7 2′-Me consecutive modifications at the 3′ terminal region, preferably including the terminal nucleoside at the 3′ terminal region.

[0046] In a further aspect, the invention relates to an inhibitor or an inhibitor for use according to the invention, wherein the siRNA oligomer further comprises one or more phosphorothioate internucleoside linkages.

[0047] In a further aspect, the invention relates to an inhibitor or an inhibitor for use according to the invention, wherein said one or more phosphorothioate internucleoside linkages are respectively between at least three consecutive positions in a 5′ or 3′ near terminal region of the second strand, whereby said near terminal region is preferably adjacent said terminal region wherein said one or more abasic nucleosides of said second strand is/are located as defined herein.

[0048] In a further aspect, the invention relates to an inhibitor or an inhibitor for use according to the invention, wherein said one or more phosphorothioate internucleoside linkages are respectively between at least three consecutive positions in a 5′ and/or 3′ terminal region of the first strand, whereby preferably a terminal position at the 5′ and/or 3′ terminal region of said first strand is attached to its adjacent position by a phosphorothioate internucleoside linkage.

[0049] In a further aspect, the invention relates to an inhibitor or an inhibitor for use according to the invention, wherein the oligomer is an siRNA and the second strand of the siRNA is conjugated directly or indirectly to one or more ligand moiety(s), wherein said ligand moiety is typically present at a terminal region of the second strand, preferably at the 3′ terminal region thereof.

[0050] In a further aspect, the invention relates to an inhibitor or an inhibitor for use according to the invention, wherein the ligand moiety comprises
[0051] i) one or more GalNAc ligands; and/or
[0052] ii) one or more GalNAc ligand derivatives; and/or
[0053] iii) one or more GalNAc ligands and/or GalNAc ligand derivatives conjugated to said SiRNA through a linker.

[0054] In a further aspect, the invention relates to an inhibitor or an inhibitor for use according to the invention, wherein said one or more GalNAc ligands and/or GalNAc ligand derivatives are conjugated directly or indirectly to the 5′ or 3′ terminal region of the second strand of the siRNA oligomer, preferably at the 3′ terminal region thereof.

[0055] In a further aspect, the invention relates to an inhibitor or an inhibitor for use according to the invention, wherein the ligand moiety comprises

[chemical structure]

[0056] In a further aspect, the invention relates to an inhibitor or an inhibitor for use according to the invention, having the structure:

[chemical structure]

[0057] wherein:
[0058] R₁ at each occurrence is independently selected from the group consisting of hydrogen, methyl and ethyl;
[0059] R₂ is selected from the group consisting of hydrogen, hydroxy, —OC₁₋₃alkyl, —C(═O)OC₁₋₃alkyl, halo and nitro;
[0060] X₁ and X₂ at each occurrence are independently selected from the group consisting of methylene, oxygen and sulfur;
[0061] m is an integer of from 1 to 6;
[0062] n is an integer of from 1 to 10;
[0063] q, r, s, t, y are independently integers from 0 to 4, with the proviso that:
[0064] (i) q and r cannot both be 0 at the same time; and
[0065] (ii) s, t and v cannot all be 0 at the same time;
[0066] Z is an oligomer

[0067] In a further aspect, the invention relates to an inhibitor or an inhibitor for use according to the invention, having the structure

[chemical structure]

[0068] wherein:
[0069] r and s are independently an integer selected from 1 to 16; and
[0070] Z is an oligomer.

[0071] In a further aspect, the invention relates to an inhibitor or an inhibitor for use according to the invention, formulated as a pharmaceutical composition with an excipient and/or carrier.

[0072] In another aspect, the invention relates to a pharmaceutical composition comprising an inhibitor according to one or more preceding aspects, in combination with a pharmaceutically acceptable excipient or carrier.

[0073] In a further aspect, the invention relates to a pharmaceutical composition comprising an inhibitor according to the invention, in combination with a pharmaceutically acceptable excipient or carrier, for use in the treatment of a disease related to a disorder of haemostasis, such as haemophilia.

[0074] In another aspect, the invention relates to the use of ZPI as a target for identifying one or more therapeutic agents for the treatment of a disease related to a disorder of haemostasis, such as haemophilia.

[0075] In another aspect, the invention relates to a method of treating or preventing a disease related to a disorder of haemostasis, such as haemophilia, which comprises administering to a patient an inhibitor of ZPI, such as an inhibitor as defined according to one or more preceding aspects.

[0076] In another aspect, the invention relates to ZPI for use as a biomarker of a disease related to a disorder of haemostasis, such as haemophilia.

[0077] In another aspect, the invention relates to ZPI for use in an in vivo method of predicting susceptibility to a disease related to a disorder of haemostasis, such as haemophilia, typically by monitoring the sequence and/or level of expression and/or function of ZPI in a sample obtained from a patient.

[0078] In another aspect, the invention relates to a method of predicting susceptibility to a disease related to a disorder of haemostasis, such as haemophilia, and optionally treating a disease related to a disorder of haemostasis, such as haemophilia, in a patient, said method comprising:
[0079] (a) obtaining a sample from the patient,
[0080] (b) detecting the sequence and/or expression and/or function of ZPI in said sample obtained from the patient,
[0081] (c) predicting susceptibility to a disease related to a disorder of haemostasis, such as haemophilia, based on the sequence and/or expression and/or function of ZPI in said sample obtained from the patient,
[0082] (d) preferably administering to the diagnosed patient an effective amount of an inhibitor of ZPI.

[0083] In another aspect, the invention relates to an inhibitor or composition according to the invention, in the preparation of a medicament for use in the treatment of a disease related to a disorder of haemostasis, such as haemophilia.

### FIGURES

[0084] FIG. 1a shows an exemplary linear configuration for a conjugate.

[0085] FIG. 1b shows an exemplary branched configuration for a conjugate.

[0086] FIGS. 2-5 show preferred oligomer-linker-ligand constructs of the invention.

[0087] FIG. 6 shows the detail of the formulae described in Sentences 1-101 disclosed herein.

[0088] FIG. 7 shows the detail of formulae described in Clauses 1-56 disclosed herein.

[0089] FIG. 8 shows, on the left (A), a typical pathway view of the coagulation cascade which is too simple to represent the biology realistically. On the right (B) is an example of a network model which captures the full complexity of haemostasis.

[0090] FIG. 9 shows an overview of the network biology workflow (top). (Middle) Haemostasis directed network. Directed network constructed using ETX proprietary interactome which includes directed interactions from NLP and curated pathway data. (Bottom) Target identification using KPA on the haemostasis network. Right panel is a bar chart showing the top ranked proteins using the KPA approach. While clinically validated haemophilia target AT3 ranks in the top 10 proteins, ZPI ranks higher by this chosen network metric. Heatmap panel on the left shows whether the proteins are expressed in hepatocytes and/or secreted.

[0091] FIG. 10 shows the visual bleeding score of mice in three different treatment groups (wild type control group, Haem A mice that received a vehicle (0.9% saline), and Haem A mice that received the GalNAc-siRNA construct ETXM1184) 3 days (FIG. 10A) and 10 days (FIG. 10B) post injury. Definition of the bleeding scores is provided below.

[0092] FIG. 11 shows (A) a comparison of knee diameters at day 3 and 10 post injury of mice in three different treatment groups (wild-type control group, Haem A mice receiving vehicle (0.9% saline), and Haem A mice receiving the GalNAc-siRNA construct ETXM1184) and (B) a comparison of skinned knee diameter at day 10 post injury of mice in the same three treatment groups.

[0093] FIG. 12 shows a comparison of the severity of (A) bone marrow hyperplasia, (B) osteoarthritis, (C) chondrocyte degeneration/necrosis, (D) haemorrhage, (E) haemosiderin deposition, (F) haematoma, (G) osteoclastogenic bone resorption, (H) osteolysis, (I) periostitis, (J) sub-chondral bone sclerosis, (K) tendon degeneration, (L) tendonitis and (M) tenosynovitis (FIG. 12M) in mice in three different treatment groups (wild-type control group, Haem A mice receiving vehicle (0.9% saline), and Haem A mice receiving the GalNAc-siRNA construct ETXM1184).

### DETAILED DESCRIPTION

[0094] The present invention, inter alia, provides inhibitors, for example oligomers such as nucleic acids, such as inhibitory RNA molecules (which may be referred to as iRNA or siRNA), and compositions containing the same which can affect expression of a target, for example by binding to mRNA transcribed from a gene. The target may be within a cell, e.g. a cell within a subject, such as a human. The inhibitors can be used to prevent and/or treat medical conditions associated with the e.g. the expression of a target gene.

[0095] In particular the present invention identifies inhibitors of ZPI as useful in the prevention and/or treatment of a disease related to a disorder of haemostasis, such as haemophilia.

[0096] Protein Z-dependent protease inhibitor (ZPI) is a protein circulating in the blood which inhibits factors Xa and XIa of the coagulation cascade. It is a member of the class of the serine protease inhibitors (serpins). In humans, ZPI is encoded by the ZPI gene (SEQ ID NO:1).

(ZPI)
SEQ ID NO: 1
AATGTGGGTTGGAGCCCCCATACAGAATCTCTATGGGGGCACTGCCTAGTGGAGCTGTGAGAAGACG
GCCACCGTCCTCCAGACCCCTGAATGGTAGATCCACCGACAGCTTGCGCCATTTATCCGGAAAAGCCA
CAGACACTCAACGCCAGCCCGTGAAAGCAGCCAGGAGGGAGGCTGTACCCTGCAAAGCCACAGGGGC
AGAGCTGCCCAAGACCAAGGGAAGCTACCTTTTGCATCAACGTGACCTGGACTCAAAGGAGATCATTT
TGGAGCTTTAAAATTTGACTGACCTGCTGGATTTCAGACTTGCATGGGCCCTGTAACCACTTCGTTTAG
GCCAATTTCTCCCATTTGGAACAGCCGTATTTACCCAATACCTGTAACCCCATTGTATCTAGGCAGTAA
CTAGCTTGCTTTTGATTTTACAGGCTCATAGGCAGAAGGGACTTGCCTTATCTCAGGTGAGACTTTGGA
TTGTGGACTTTTGGGTTAATGATGAAATGAGTTAAGACTTTGGGGGACTGTTGAGAAGGCATGATTGG
TTTTGAAATGTGAGGACATGAGATTTGGCAGGGCCAGAGGCGGAATGATATGGTTTGGCTCTGTATCC
CCACCCAAATCTCATCTTGAATTGTACTCCCATAATTCCCACATGTTGTGGGAAGGGACCCAGTGGGA
GATAATTTGAATCATGGGGGTGGTTCCGCCATACTGTTCTTGTGATAGTGAATAAGTCTCACAAGATCT
GATGCCTTTATTGGGGGTTTCTGCTTTTGCGTCTTCCTCATTTTCTCTTGCCGCCACCAGGTAAGCAGTG
CCTTTTGCCTCCCACCATGATTCTGAGGCCTCCCCAGCCACGTGGAGCTGTAAGTGCATTTAAACCTCT
TTCTCTTCCCAGTCTCGGGTATGTCTTTATCAGCGGCGTGAAAATGGACTAATACACTGTGGTTATGTA
TTATAGTCATATGATATTTTCATATTTTTGGAAGCTGGGTGAAGGGTAGATGTGGAGACCATGATTTTT
GCAAATTTTTTTAAGTTTAAAGTTATTTCTAAATTAGAAGTTTAAAAAGAAGAAATCACATAAGCCAT
AACACAATAGAAAGATGTCTTTAAAGTTCAAGGCAGGAGGGATGTCTGGAAATCAGCGAGAAATTTG
CACCTGTGTGTGCATGTGCATATGTGTGTGTGTATGTTGCAAGGACTTGGAAAGCCCTTTTTTTCCTAC
CTCTGTACTACTGTGGGGGGAGGCTAAACTTGACTTCTTCCCATCTTAGTTCTTTTTTGGGATAGACTC
CTGTAACAAAAGACAGACAAGAGAAAAATCAGCTTACAACATGGGCCATGCACTTCACACAGGAGAA
ACCTGCATGAAAAGTAACTCAAAATGGTGCCTTAGAACTCCACTTACCTTTAGTAAAGAGCAATAAAT
TAGCAGGAAAATCATGGATCGGGACAAGGGAAGTGGTTTTATGCTTCCAAGGGCAGGAAATCATGGA
AGGTAAATATATGGGAGGAAACTAAAGGAATAAGGCTTGTTTGCATATTCCTCTGATGCCATCTCTGG
GTTGATAAGAGTCTAGAGTCATTTCCAGTAAAGATGAATTTTTATCTGTCTTTAGGAAGAAAGGGGGA
AAGATAGAGAAAACTATTTCTCCATTTGCTGTTTCTTAATTACCTTCAGTTCAAAAATAATTTTTATATC
AGAAAGGCATATTTAGAGGTATGTTAGTTTATTTTCACACTGCTAATAAAGACATACCCAAGACTGGG
TAATTTATAAAGAAAAAGAGGTTTAATGGACTCACCGTTCCACATGGTTGGAGAGGCCTCACAATCAA
GGCAGGTCTTACATGGCAGCAGGCAAGAGGGAGAATGAGAGCCAAGCGAAAGGAATTTCCCCTTAAA
AATCCCCTTATAAAACCATCAGATCTCGTGAGACTTACTCACTACCACAAGAACAGTATGGGGGAAAC
CACCTCTATGATTCAATGATCTCCCACTGGGTACCCCCCAACAACACGTGGGAATTATGGGAGCTACA
ATTCAAGATAAGATTTGGGTGGGGACACAGACAGACCATATCAAGGGGTAACATAGTCTGGTTTCCTT
TACTACCCACCTACCCAAACACCCCCTTCATCTGATCCACACAAAGTAAACTCTTGCAGTTCTCTCACT
GTTTCCTGGAGTCTGCTTTTGGTCTCATAGGACTGCCCTAACGCTTGTTTTTCAGACGTTTAACCCTGTA
GGTCTCTGGACAAATTTGCTTTAGAAGCCCCTCGATGTCGCCCTGAAGAGTGGCTTTCAGAAGTTGTGC
CTCCTGCCTGAGGGGAGTTCCAGGAAGGGTTCTGCATCGCCTATGAGTTTATCTGGATCACCAGAGGC
CTTCCCGTCAGAGCTTTCCCAATCGTTTTTGGCCAAGGAGTGTGAGAAGCTAAAGTTCATAACAACTG
GAAGTCAGACAGCCTGGTCTATTCTGCTTTAACTCTAGCAGGAAAGGCCTTCATGGTGGGGCCTGAAT
ATCTTCCTTTATAAAATCAAAGCCTGGGGACAGGGTTACTTACTTCTGAGGTTCAATCTGGCTCTAAAA
TTATGCAACAAATGCCATTCCTTTAGCACTTCCTTCCTACCGGGCGAGATACTCAACTCCACAGGCACC
ACCTCAGTTCATCCTCTCAGAAGTCCTAACAGCTCAGCCTGGGGCACCCCATTTTACAGATTAGTAAAC
TGAGGCTAAGAGAGGTTAGGTAGCTTGTTCAGGGTCATGCTGCTGGTAAAAGAGCTCAGGCTACAGTG
CTATGCATTGAGTTTTCTCACTTTCCCATCTAACTGGAGGGCTAAAGGTCAAAGAGTGGGCAGCTCCCT
TGTTGGGAGCTGTACAGGAATAATGTCCTCCCTGAAGGAGGGGGACTTCTGAGCCACACCCTGGGGTC
CAGGGCTCACAGCCTTAGGAGCAAAATCGTCCACCCCCTTCCTGGTTCCTCGGTGCTGCAGAGATATT
CATAGGACAGAGTCTGAGTTCTGGCCACTTAACAGAGGAAGAAAGGCTGGCTCGGTGAGGTTAACTT
ACATCCCAGCAGCTAGGAACCGGGAGCAGAGGACCTCAGATTCACACCAGGGCAGGAGGCAATGGCC
TGGCTGAAGCCTTCACAATCTTCCCAATATACTCCGCTGCCTTCCTTTATAAGGATCCATTTCTGAAAC
CCTGTGCCCTGGCCAGGCACGGTGGCTCACACCTGTAATTCCAGTACTTTGGGAGGCCAAGGCAGGAG
GACCACGAGGTCAGGAGTTTGAGACCAGCCTGGCCAATATGGTGAAACCCCGTCTCTACTAAAAATAG
AAAAATTAGCGTGGTGGCAGGCGCCTGTAATCCCAGCTACTCGGGAGGCTGAGGCAGGAGAACTGTT
TGAACCTGGGAGGTGGAGGTCTCAGTGAGCTGAGACAGACAGTGCCTGGGTGACAGACAGAGACTCC
GTCTCAAAAAAAAAAAAAAAAAGAAAGAAACCCTGTGCCCTAAGACCTGCACACTCGCTGGCTCCGC
TCAGACATTTAGCAAAGCAGACACCTTCCCAGGCCTGGAGGAAACAGCCCCTGCTTTTTGGGAATCCA
CAAGCCCGCAGCTGCAGAGCTCGACCTGGATGGGCAGGCAAAGGCTGACTCCTGTGCGTGGTGTGAG
TCCAGCCTGGCCCCTCTACACCCTCACTTTCACCTCTTAAAGAACTGCCTATTAACAGAGCAGGTACTG
CCCAAAAGGAACACTCTGGAAACTTGTTGGGACACTTCTGCCTTTCACAAACGTTTGGGGGGAGTACT
ACTAGCATTTAAGGATTGAGGGTTAGCAATGCCAGACATACCAGAACACGCAGGGCAGTCTCCCATG
ATGAAGAGGCCGCCGGGTTCCCCAGGACTCACATGTCCACCTCAAGTTCACGTGGGATTATCTGAGCC
TAGACTGTCAGTCCTGGGGCTGCTTTATTTCATATAAAAATATAATATTTATCCAAGGTTTTACTACAC
ACTGCATTTTCTGTGAAGACAATGACCGTGTAAATCAGGGAAAGATCTATATTTTATTTTGTTTGAAAC
TTTACCAAGCATTATTTACCATTTCAAAAGCTCTATCCCTGGTAGTACCATTGGTTTTCTTGTTCACCGG
CCAGCAGTGAGCAGCACACAAGCGACCTCCCGTGGGCTCCACATTGGACAGCCTCACTGCACCTGCCC
AGGCCCTTAGGCCACAGCACTGCCATATTCAGGGACACATTATTCTCTTTTATTATGCCTCCATATTAT
CATTACAGCATTATCTTTTTTTTAATTTTGTGGGTAGATTATATTAGCTATACGTTTCACTTCAATGGTA
GTAGTAAGGGGCACATAACAAAATATTTACTTATATATATTAAAAAAGAGAGTCTGAGAAGTCTGAA
AAGTTTTGCCATAAACGGTCTCCACCAGCCTCAACTCTGAGTGCCCGAGGATTCAGTCTCAAGTCCAG
CAACATTGTGAAGCAGGAAATTTACCTTGAAAGGAGCTATGTACTCTAAGTAGTGATTTACCTGTCTG
CCTCCCCCACTGGATTGACCAGTTCCTTGGGGGCTGAGAGAACAGGTCCTGAACATTTCTGCTGTGCCC
CCCAACCCACATCCTCATAGTGTCCAGTACCAGGCTGGGGACTCAGGAAGCATCCATGGGATCCCCCA
GTGCCTTCTTTCTCGAGGTGTTCAGCACCTAGAACAGCTCAAGACAAATTCCCCACACCCCACCCAGA
CAGAGCTGAATCTTACTGGGGCGAAGCCTTGAGTTGCAAGGCAGAAGCTCTCGTGATGGGATTTGGGT
CATATTCCGGGTTATAGGAGGAGCTGGGGAGTATGGGAAGCCTCCCACTTGGTCTTTGGTTTTCCAGA
AACTCCACCATCACAAGCAGGATGTTAATCAGTAACCGTCCCACAGGGGATCATACTTTGGAATAGCA
AATATTTGCTGAAGGTTCTGGGCTGCAAAGCTGAAGCTTTGGTTTCTGCTCTAAATGAAGGACTTTTCC
AGGACCCAAGGCCACACACTGGTAAGAGGCAGTGGGTTACAGGAGACCTTCAATGAGTCTAATCAGG
GAGGGACCGGGAAGGATGGTATCATCCCTGGGCGGGCTCCAACGTGAGGGCTGTGTGGCTGAGCAGT
GCAAAGACCTCCATCCTACACTCCACAGGGACTGTACATACAGATTGGGAGCTGGAGTGGGGTAAGA
GGCGAATTATAGACACAAGGGGCTCCTCTGCAGGAAGGAGGCCAAGGGAAAGAGGCTTGAAAGGCTT
GATATTTCACCCACCACCACTCACTGCCGGAGTAAGCAGGTCTCCCCTTCCCAGGGCTGAGGGGAGGC
AGGGATGTGTGCTGTCCCAGGGCTGAGAAGTGGCAGGTGAGCTGGTGATTCCTTACTGCCCAGGTTCT
GTCTAGGAAGGTGCGTCCTCACCATGCTGGATGGTGTCCTAGTCCAGGAGCACCCCCTGAGCTCCTGG
CCTAGACTCCAAAGGGTTGGGTAGATGAGCAAAGACTTTACAAAGACCTTAGGCGATATATGTCCAGG
AGCACCCAGGAATTACTGGGCTACCACTGCAGACTGCAGGACAAGCTCCAAGAACAGGAAGGTAAGA
CTCAGCATTTGGAGGTGGTGACATCTAGTTGGCGTGCTGGGCTAATTTCCTGACCATTGTACAGGGAG
AAGTAACCTTGAATTCAGGAGTATTCTGTGTGGTCTTAATGTAGAAAGTAGCACTAAATGATGCCACG
TAATCGTTTTAGCTCAGGCTCCTCTAACAAAACACCACAGGCTGGGTGGCTCCAACAGCCATTGATTTT
TCACAGTTTTGGAGGCTGAAAGTCCGAGTCAGGGTGCCAGCGTGGCCGGATTCTGGTAGGGCTGTCTT
CTTGGCTTGCAGATGGCCACCTTCGCACCGTGTCCTCCCATGGAGAGGAGGTGCGGAGGGGGACTCTG
CTCTCTTCTTATGACAGCACTAGTGCTATCACAGGGGCCTTGCCCTCACGACCTCATCTAAACCTAATC
ACCTCCCAAGCGCCCCAACTCTATTGCCATCACAATGGTGGTTCGGGCTTCAACTTATTAATTCTCAGG
GGACACATTCAGTCCATAACAATAAAAGCGTGAAACTGGGCTGCGTTTACACTGAAAGAGCTATTTAC
CCAACGTTTACAATACTTGGGTGACCTGTTGAATGCAGGCTTGCCATTTAGAGTCAAAAAGAGCTTCC
TCAACAGTGTCCTTTGGGAAACACAGTGGAAGTATTTCACTGCTTCTACAGGGGAGAGGGTAGTGCCG
TTCAGACTGCAGAGTGAGGCCCTGAATTCCGGGGTGCCATTCAGCCCGAGCAAGGGGCAACATGCTG
GGCCCTGGCGCTGGAGGCGGTTTTGTCCCAGGCATAGATAAGGACTCAGCCCCTGCATCAGGAAGAG
GCCTGGCAGCACCGCCTGTCAATACATTTTGCCGCAGGTGACCTTGGTCAAGAATAAGGGTCTCTGCT
GATGGGAACTACTGTGAGGCCGGCAGCATCCACCCTGCGCTCACTGGGCTGGGTGGCCTACCCCACCC
AGACCCTCCCAGGGCAGTGGGCCCAGAGAGAGGATGAGGGAGGGCAGGTGTCCCAGGGGTTCTGCCC
AGCCAGCCTCTGGGATCAGGCCTGCAGTGTGGCTGAACACCAGAACTGAGTTTGGACACAGCCAGGT
GGCCCAGGCCAGTCCCAAGCCATGTATTTGGATGGAAAACATGGAAGTATTCAGGAGCCAGGCTCTGT
GTCCAAGGATGTGGAGGGAGCCTAAAAGGCGACAGAGAAGGGGACAGCTAACGGTGAAGAAGTGTA
GCTCCCACACTGCAGCCTAGGACAGTGAGAACCGGCATGCAGCCCAGGTGGCTGAGGGCTCTATGAA
GCCACAGTGGAGGGAGCCCAGAAGTGGGTTGTATGAATTGCGGGGCCTCCTGCTACCCGGGAGCTGC
AGCTATAGGAAGGAAGGAAGGAAGGAAGACCTCCAAGGAACTGTGTAGCAGAGGTGCAGTGCAAAG
AGAATTTTGATAAAAAATCCAGGAAAGCTCCAATACTTTCCCCCTTCCTTGCCTAACGGGCATGCAGG
CACTCCAATCCCCAGCCAAACAGGGCACTGGGCAAGGCCGGCCACCCATCTGGATGGGCAGCCTGAC
GACCAGATGGTCAGGGCAGTGAATGAAGCAGATCAAGGAAAGGTGTGTGAGGACCCCTGATTCCACC
TGCTTGGACCCCCACCTTCTGTGCTGCCTCCTGCTCCCAGAGTGGACTCTCTTGCCCTGGCCCTCAGGG
AGGAGACGGGATGAATGAAAACGGGGTCAGGACTGAGAGCTGCCTGCCGGCCTGGCAGGGAATGGG
AACTGGAGGAGGTTTTGCTCTGTGAAATAATGTCCCCTCTTTGGGTGAGCAAATGTCACCCACACTTGC
TCTAGGTCTCCCTGGGGCAGGGCTAACCTACTTGAGCCACAGGAAGGAGGCAGGGTCCCTGAAGAAG
CTTTTACTATCCACAAAGACATTTTAGGAGGCATTAAAACCATCTCTATCCTCTCCTCTCCACAGGAAG
TCTTGCAGCTGAAGGGAGGCACTCCTTGGCCTCCGCAGCCGATCACATGAAGGTGGTGCCAAGTCTCC
TGCTCTCCGTCCTCCTGGCACAGGTGTGGCTGGTACCCGGCTTGGCCCCCAGTCCTCAGTCGCCAGAGA
CCCCAGCCCCTCAGAACCAGACCAGCAGGGTAGTGCAGGCTCCCAAGGAGGAAGAGGAAGATGAGCA
GGAGGCCAGCGAGGAGAAGGCCAGTGAGGAAGAGAAAGCCTGGCTGATGGCCAGCAGGCAGCAGCT
TGCCAAGGAGACTTCAAACTTCGGATTCAGCCTGCTGCGAAAGATCTCCATGAGGCACGATGGCAACA
TGGTCTTCTCTCCATTTGGCATGTCCTTGGCCATGACAGGCTTGATGCTGGGGGCCACAGGGCCGACTG
AAACCCAGATCAAGAGAGGGCTCCACTTGCAGGCCCTGAAGCCCACCAAGCCCGGGCTCCTGCCTTCC
CTCTTTAAGGGACTCAGAGAGACCCTCTCCCGCAACCTGGAACTGGGCCTCACACAGGGGAGTTTTGC
CTTCATCCACAAGGATTTTGATGTCAAAGAGACTTTCTTCAATTTATCCAAGAGGTATTTTGATACAGA
GTGCGTGCCTATGAATTTTCGCAATGCCTCACAGGCCAAAAGGCTCATGAATCATTACATTAACAAAG
AGACTCGGGGGAAAATTCCCAAACTGTTTGATGAGATTAATCCTGAAACCAAATTAATTCTTGTGGAT
TACATCTTGTTCAAAGGTACTTTGATAATGTTCTGCTCTCCCAAGGCCACAGGGCCCTACGATTGTCTC
TCCCTTTCCTTTCGTTAGGCCAGCATATGATTAACGCTACGTGATTTTCTATGAATGTGTTTTCACGTTT
CAAAAACAGATTGATACACATATTGAACAGTGCCAGACGCTGTCATTTGAGGCCCTTCCCTGGTATCC
TATGTGCTTGTAGTCCTTATTATTTTCAGAGCACTCTACATAGCTCCCCTCTGACACTTAGAAGCATAG
GGTCTTTCCAAAAAACAGGGGGCTGGGGGATTATCTGGGGGATTTAGGATTGCATCATTGCTCCTTCA
TTTTTACTTTTTGACCAACTCTCTGCCCTTAGATTCCTATTATAGAAAATAGGGACACTCCACCTACTAC
AGTGTTAGAGGCTAAATGAGACAATGAATGTAAAGTGCCCAGATGGGCTTGGCACATAGCAGACACT
GAGTATCTATTGTTTACTTGTTCTTCCAAACTGCCAATCAGCAGGTAGAGCAGGAGTTGTCTCCTTTCT
AAAGATGAAACCAGCTCAGAGACGTTAGCTTGATCAAGGTCACACAGTAAGTGGCAGAGGCAAAACC
CAAACAAGGGCCTCCTGACCCCCTGATCCTAGGTTCTGTCCAGCCCTGCCTCCCTAATGGGGCACTGG
ACGTGGGTTGGATGCCACTTTCGCAGAGCTGGCACCAGACTTACAAAGCCCCGGCAGGGGAAGCCAC
TTTACAACCAGCCAGGCCACACCCCCAGGGCAGACGTTTATGTAGAGAGTAATGTACCTGCCTGCTAG
TAGCCTCTGCATTGTGGGGCCTTCTCTCAGAACCACACTAAACAGTGGGTGGGTGAGAAGTGTCACTC
CTGCCACCTTGGACTCTGCATGTGCTTGTGCCTGGTGTGAATGAGACAAAGTGGCAGTCAGAGGTGCC
AGGCAAAGGCTTTTCTCTAAGCTGGAGCCAACTATGAGGGAACGACTGTGAATTCCGTTCAGGTCCAG
GACAATGAGAGGAGCCAGGGATTGTTAGGAAACATTTCCCTGCTTTCGTGTGCGATTCCCAATAGGGC
CTGCGAGTGGAGCTGCATTTTGCTAGCTGGGCTAGAGGACGGGGAAAATTTTGGGGAAATTTATTTTG
CCTGCCTGAGCTGTGGAAAAGCCAACCCAATTAGGGAACGCCTTTCCTAGTTGGAACGAGAAGACGA
GAAGTGAGAGAAGTGAGATAGAAGGCTCCCTCTCTATTATTTGAGCAAGAACAATGCTTTTCAAAGAG
GGAATTTCTGCAATGAGTTCTTCTCTTACTTGTTCAGGGAAATGGTTGACCCCATTTGACCCTGTCTTC
ACCGAAGTCGACACTTTCCACCTGGACAAGTACAAGACCATTAAGGTGCCCATGATGTACGGTGCAGG
CAAGTTTGCCTCCACCTTTGACAAGAATTTTCGTTGTCATGTCCTCAAACTGCCCTACCAAGGAAATGC
CACCATGCTGGTGGTCCTCATGGAGAAAATGGGTGACCACCTCGCCCTTGAAGACTACCTGACCACAG
ACTTGGTGGAGACATGGCTCAGAAACATGAAAACCAGGTACAACTCTTGCCCACACCCTATACAAACT
CTACCTTTCTGTACTGGCAAACGCTCAGCACAATTTCATTGAATGCACCGTGATTTAATGTCTCCTCCA
GTGAGCTATAAGTTTCCTGAAGGCAGGGCAGCATTTGTCTTTTTTTCCACTCTATCCCCAGCATCTGTC
ACAGGGTGCCTGGCTGATTCATTCATTGAGTCCATCAGTATTTTACGTTCTGCGACTGTGATAAATATA
TGATGCCAGGGATCCATCAGCAAACAAAACAGGCAAAATTAGTCTGCCCTCATGCAGCTTACATTCTA
TTGAAGGAAGACAAAGAGTAAATTAAAAATAGGTAATAATGCAGGGAAGGGGACAAGAAGCATCAT
CAGGATGCAGATGGAGGTTAGACAAGGCCTCTCCAAGAAGGTAACAGTAAGCAAACATCTGAAGATG
AAGGATAAACCATGTGGATATATTCGGGGAGAGAAGTGTTATGTTACAGGCAGAAGTGTACAAGTTCT
GGGATGGGAGTGTACCTGGTGGGTTTGAAGAACATCAAGGAGACAAGTGTGGCTTCAGCAGTTGGAG
ATAAAATCAGAGAGGAAACAGGGGCCCAGTCCCCAGAAAAGACTTGGGCTTTCCTGAGAGAGGCAGG
AAGCCACTGGATGGTTCTGAGTAGAGGAGCAACCTGATTTTGACTTCTGTTTTTAAAGGATCACATAA
GCTCCTGTGTTGAGAAAAGACACTAGGGGGTAAGGATGGAAGCAAGGGAGAGTGGTTAGAAAGTTAC
TAGCAATCCAGGTAGAGATGCTGCTACCTGGACTGCGGTGGTGGTAGTGGAAGTGGTGAGAAGTGGC
TGGATTCTGGATCTATTAGGAAGTGCAGGATCTGCTAATCGATTGGATGTGGGTGAGAGAGGTGTCAA
AGGTGATCACAAAGTTTTTGGCCTTAGCAACTGGAAAGACGGATTTGCCATTTACTGAAAGGGGGAGG
AACAGGTCTGGGGTAAGTGCAGAAGTTCAGTCTTAAACACTTGGATCAGAAATATCTATTAGACATCC
AAGTTGAGATGTCAAGACGACAGGTGGATCTGGAGTCTAGGGTGAGGTCCAGGCCGGAGATATAAAT
TCGGTCATCAACACAGAACTAGAATCTAGACACATGACAGGGTTGGGGTCTGTAAATATAGAGGAGA
GGAAAAGAAAGCACAGAGTGGGCACTGAAATGTCTGCCCAATAAATTAATCCACCTATTGGAGTACA
AGGAAAATGGCTGCAATACGAATTCCATGGCTATGGCTTCTGAATCCTGTGACTCAGATTTTGGCAGA
CAAGTGCAGCTAAAGGTCCCCAGGGTTAGTTTTATCTTCATTATTCTTCTTTCATTTTTCTTCATATCTT
TAGCACCTAACAATGAACCCCAAACATCATAAGCCCTCAAGTAATGTTTGCTGAATGAATAACTTTTT
AAATTAATCTTCAAGACACGTCATGTCCTCAATTATTTTTAAATAAATAAAAAAATTTTATTTTGAGCC
ACAGAACTCATCTTTTCAAGCAACATATTTTCAAAGGAGGACTCCAGTATACAAAATAGATGGTATCA
GAGCTTCTCTGGCTAAAGACGGGTAGGGGTTGAAAGTTTTCTTTGCTCCCCTCCCCATCCATCCCCAGA
CTCCTCGGGTCTGCAGAATCCAGGAGCTGAAAACAGCCATCATCCAGGAGGCTGCAGGACTGCTGAA
AGCAGCTGTTAACTCAGGTTTTTTTTAAAATATAGGGAAATGAACACATAAGTACTTTGCTAAAGAAA
ACGTGAGTCACTGGCTGAGGAATAAAACTCATTCACTGAAGCTGAAGTACTATTTGATAAGCTAGAAA
TATTTTCCCTGAGTAGACCACTGTAAAAGAATGGCATGAACTACATAGTCAACTGAAAGACTCATTAA
TGGAAATAATCTTAAAGAACAAAAATTGTGACCTTTTTGGTGTCCACAGACTAGGGCTTTGTCTACATT
TCACCATCATCTGTTCTTGTACCACAGAAACATGGAAGTTTTCTTTCCGAAGTTCAAGCTAGATCAGAA
GTATGAGATGCATGAGCTGCTTAGGCAGATGGGAATCAGAAGAATCTTCTCACCCTTTGCTGACCTTA
GTGAACTCTCAGCTACTGGAAGAAATCTCCAAGTATCCAGGGTAAGTCAGGATCTTTCATCAGAGCCC
AACCTCAGCATGAAATGTCACCAAAACAAATGCTTTTACAAACCATTTAACTTTGATAAAATACCTAA
TTGTAGTGGAAAATTAGATTTAAGTCCCAAATACTTGAAATAGCACCCAGGTTGGATGTTTTAAGAAT
TTCAAGCAACTTCATTAAAATAACTTTTCAACTAATTTATTTTAAGCAGACCTCTCCCCCTCTGCTTAA
AGTGCTCAGGGAGAAATTTGACCCTGAAATAGAACTGGTTTACAGAGGCATCATCATTTATGTTGAAT
ACAACTTGAATAGTTCATGAAATTACACCACCTTTACAATGAAACAAACCCCTAGACATCATCTAGCC
CAACTTCTCCCTCCTTGTGGAAATCCCCTCCATAGCCCTACGAAATAGCCCTCCAACTTCTCTTCCTCTT
CATGCTTCCAGTGACATCAAACTCACCATTTCTTTGAAGAGCTGCCCAATCCACAAATAGCTAAAATT
GTTATATGTATATATATATATGTGTGTATATATATGTATATATGTATGTGTGTATAAATGTATATGTGTG
TATATGTGTGTGTGTATATATATATACACACACATATATATATATATGGAGAGAGACATACATATATAT
ATGGAGAGAGAGAGAGAGAGAGTCCTGTAACTTCTGATTCATACTTTTTGGTCCTAGTTCTATCTCTAA
AACTTCTAAGAACAAGTTTAGTCACCATCCACATAGAATCCCTTCAGTTACTCAGTGTTTCTCAGTGGA
AGGGTTCTTGGTTTTGAGGGGAACTGCTTGTTGTCCAGAGCAGTTGTGCATGTTGCAGGGAACTGGTT
AGCATTGCTGGCCCATGTTCACTAATGCCAGTAGGAAACTCCAGTCATCACTATAAAAATGCTCCCAC
ACATTTCCAAATGGCAGCTACATCTCTCTACATTCTTCCTTAGCTGTGTGGTTTAATATTTTCTTATACA
ATTGCAATTTTCAATTCCAAGAGAGACTAAAAATGGCATCCACTTAAGTAGGACACAGTAGGGTAACT
GTGGCCTGGAATCAGGTCTTACAACCTCAAGAGAGGTAAGACAATTAAATAAAACAATCCGTCAGAC
CAGCACCTGAAAGTGTTTCTGCTATGAACACATGAAAAACTGAAATGCGCTGCTGCTTTATGAAGGGT
CATCATGAAATTTAAACTGTAAATGATTAAATATTCTCCCTCTGTTTGCTCTGGGGAATTAATTTTCCTC
TAGGAAATCAGGGAATTTCCTGGAGTGAAAATCAGTGTAATTACATGTTATGTTTTCATTATCTCTTAT
AACACAGTAATTATATAGGTACATCACTCATATCACATCTTGTTTCTGTAAAAAAGGGCCTCCCAAAC
ATAGCAAGCAGCCACAGTATAGGCAGCCAGAATTCAGGAAGGCTCCAGGGACCCCTGGGCTTGGCCC
AGAAAAATGCCTCAGAGTAGTACCAGGTGCTGGGAAGCTGCTACAGAAGACTAGCCATTCCCTGCCTC
CACCTTGCCTGCCAAAAGGAAAGTCAGAGGACTCAAGGGATCCAGGGATCAAGGGATCCAGGCAGCT
TGAAAACCTTTTAGGAGCACCAGCTCAGCTCAAGAATTAGTAGCATAAATTACATGCTCAATAAAGAT
TTGATGCATGAGTGCATCCTGAGTCCATGCCCGGAATGTGTTTCACATATTCCACAATACTTCACATTG
GGTTCCTGAGGTCTCCTGGTATTGTTTAAGACTCCTGTGGCAGTCCCTGGTGCAACCCCAGACCACTCC
TCTTAACGTAGATGGGCCTGCTCCACTAAATCCCAGGAGCATGACCCCATGGGTAGGACCACTGTGAA
GAATTTCAAGGGGCTCATTTAATTCCTCCTTTGCACTGCCACACAAATGGTTTTTCACATTATTTCCTTT
TTCCAGGTTTTACAAAGAACAGTGATTGAAGTTGATGAAAGGGGCACTGAGGCAGTGGCAGGAATCTT
GTCAGAAATTACTGCTTATTCCATGCCTCCTGTCATCAAAGTGGACCGGCCATTTCATTTCATGATCTA
TGAAGAAACCTCTGGAATGCTTCTGTTTCTGGGCAGGGTGGTGAATCCGACTCTCCTATAATTCAGGA
CACGCATAAGCACTTCGTGCTGTAGTAGATGCTGAATCTGAGGTATCAAACACACACAGGATACCAGC
AATGGATGGCAGGGGAGAGTGTTCCTTTTGTTCTTAACTAGTTTAGGGTGTTCTCAAATAAATACAGTA
GTCCCCACTTATCTGAGGGGGATACATTCAAAGACCCCCAGCAGATGCCTGAAACGGTGGACAGTGCT
GAACCTTATATATATTTTTTCCTACACATACATACCTATGATAAAGTTTAATTTATAAATTAGGCACAG
TAAGAGATTAACAATAATAACAACATTAAGTAAAATGAGTTACTTGAATGCAAGCACTGCAATACCAT
AACAGTCAAACTGATTATAGAGAAGGCTACTAAGTGACTCATGGGCGAGGAGCATAGACAGTGTGGA
GACATTGGGCAAGGGGAGAATTCACATCCTGGGTGGGACAGAGCAGGACAATGCAAGATTCCATCCC
ACTACTCAGAATGGCATGCTGCTTAAGACTTTTAGATTGTTTATTTCTGGAATTTTTCATTTAATGTTTT
TGGACCATGGTTGACCATGGTTAACTGAGACTGCAGAAAGCAAAACCATGGATAAGGGAGGACTACT
ACAAAAGCATTAAATTGATACATATTTTTTAAGATGTTTGTGCAATCTGTCTGGTATTTTAAGCTTGTTT
CTAAGAACCTTAGTTACTTGGCTAAAGACTAGCTGGGTAGAATATCTTTTCTCTGTTGCTCACATATTT
TCATTTTTAAAAAGTTGCAGATGAGAACACTATGTCAAGATAAAGCCTTTGGGAGGAACACATGTAAA
CATTCTCCTTGAGTCATGTGCTTCTCTCTCTTTCCTTCTCTCTGGTGCAAAATAAGTGTTTTATTTTAATC
TATTACGGAGTCATTTCTTGCTGACTGACATCAGAAGAAAATAGCTCTAACCAGTCCTGATCACAGCA
TCTGCTTCCATGGTGCATCAAATCGCTTGGCAGAGGCATTGGCTGAATCACAGATCATCTAGTTCAATA
CCTTCATTTTACAAAGGAAAGAAAGAGGGACCCAGAAACAGGTCCATATTCTTACTTTCATGGGCCCT
AGGCACGTTTAACCTTGTAGACTCCTCCTTCCTTCATGAAGATATATATGTTCTATGGCTGCATTGGTA
GAAAGATGAATATATTCGTCTTTCAAAGTTGCATATCTAGCTTCAAAGTTATATGTCTAGCATATGGCA
ATAAGCAAAACACCTTCATGGGCCCTTACAGTACTGTCAGCCTTGGGCACTGTGTCTTCTGCATCTAGT
GGATAAGTCATACCTTATATACCAGTGGGAACAAAATACTTGTCCAAGGTCTTCCAGTGTGGCAATGG
CAGAGTCAGAAGCCTACCTTTCCTGAGTCTAGTCTCCAAGCCCTTTTTACTCTTCCTTCCATCTAAAAC
ATCTGATGGGGACCAGGTAAACAGCATGCACTACAGCTACCCATGGGGGTTAAACAGAATATAAGCA
TGAACTTTGTCCCAGGGTGAAAAGGAAAATCGTAAATATCCCTGATCTTCCTTAGGCAGTTATTTTCTG
TCACAGAAACAGAAAAGACTATATTCAGAGAATCCTGAATAGAGCTGATTTACAGTGTGAACTATGTT
AACTAAATGCCTAATTGGATTTCTGTCTGTCTGCTATCTAATGTTTAAAAAAACCTAAAATTCATTTAT
TGATTAGTTGTTTAATATAATTCAGAGTAATGTGAATAGGTAATAATATTAATATGCAGTCTAAATACT
GACTTTTCATCATTCCATAACCTGGACTGATGAAAAGTCAGTATTTAGACTGCATATTAATAAAATAA
AATTCATTCCTGTATTCATTCCAAGAGTACTAATTGACACTTATGAAGGGACAGGCAATTCTAGGCCCT
AGAGGGCCAAAGACAGAGGACTAACTCTATCTGACATTCTTAAGTCACCTTGTTTGTGTTCAATTAGTC
AGATTTGTTTGTGGAAAAATAGTAGAAAGAGGAATAAAGTAGCATCCAGTCCAATTTCCCACTTTTAA
GAGATGAAATCTGGAAAAATAAGTCTGTGAGAGCACAATACTCACTGAAATCAATATGGCCAAACCC
AGTAATAAAAAGGTACATTATTATTGAAGGATTCATATAGCATGCAGATAAAAAACTCCTGCCTTCTT
CCCACCACATACACTGCAAAGCAACAACAGCATAATAATTGTATTTAATATACTACTCTTTAAGGTAG
AAAATGGACCTATTCTATATTTTAAATATACTTTTTAATGTTCCCTCACATTTGCTTTAAGAAGTTCCTA
AGACACTCAGTTTCAGATTTCCCAAGTACACAGGCATGACAGAAAAACGCAGACCAATAAAAAATGT
AACTTACCTTACACAAATACATACACACAAATTCAGGGTTTCCAACCGAGCGGGGGAAATCTTAACAT
TGTAGAAGTCTTCACTATATATGTGTCGAGTTTTTGTTTTTGTTTTTGTTTTTGTTTTGAGACAGAGTCTT
GCTCTGTCACCCAGGCTGGAGTGCAGTGGTGCGATCTCAGCTCACTGCAACCTCCACCTCCCGGGTTC
GTGCCATTCTCCTGCCTCAGCCTCCCGAGTAGCTGGGACTACAGGCACCTGCCACCACGACCGGCTAA
TTTTTTGTATTTTAAGTAGAGATGGGGTTTCACTGTGTTAGTCAGGATGGTCTTGATCTCCTGACCTTGT
GATCTGCCCGCCTCGGCCTCCCAAAGTGCTGGGATTACAGGCATGAGCCACCACGCCCGGCCAAGTGT
CGAGTCTTAAAAATTGTTCCTACACAGACACACTCAACCACACGTTCTCACATATATATGCTGTAACA
ACTGAGAACAGGTTACTGACTTAATCTAATTCATTCTATCTTCATTGTAAAACTTCCACTCCAGCTGAA
GAGCCTGTTTCATTTCAATTCAAAGATTTCTCATATATCCACTAATTGTATGGCAAAACTGACTCATCT
CCAGACTAAGATATTCAAGCTCAGGAAGTCAAATAATAGAAATGATTTTTTAAATGTGTAAGAGGTTA
TAAAGAAAAACTTTATGTGCTCCTTATTTAACCTCTATTAAGTAAAATCCTTTATAGACCTATCTCCAT
TTCTGCAGTAAAAGTGAGCTCTACAGTTAGCTTGTAAGGCTAACTAGTGAAATTCCTGGACTTGTTCTT
AAAAATGCAAGTTTTAGTAATTAACAAAATGATGATGAAGATGTCCCTTTTCCCTACAACTACAGATG
GAGGGAGATTTTTCTTTGCCATACAACTAGCTTAAAGGATTAATTTGATAAGTTGTTAAACTGAGAACT
TTCACAAAAGTATCCATCTTGTTTTTGATATAAATGGAGATACATGTAGTTATTCATAACTGTCAGTAA
TTTGCTGTTTATCCTGTTTCTATATATCTGTCCTTGAGAGTATAATTTTAATAAATATTTCAAAGATTTT
AGGAAATGTCATGTTCTGTTAAAAAACTTCCAAAAGTAATTTTGATGAACAGTTTTGATAACTTAGTAC
TAACTAGGACTAAGACTGCAATTGACTGCTCTACATTCCTGAACTTTATAAGCAGTAGTTGTTTCTCTC
TGTCAAATCAGTGTCCCCTTTTCCCATTTGCATCATGGGAAAGTGAAACCTTATAATTCTGCTAAATTT
ATTATAACAAATACATTGAAATTCTCCATTTTATTAAATTAATAGAATGTTATGAATCAAAGCACCAA
AAAAACTGATGCAATTTTGATGTCTCGTTCTGTACCACATTCTCCAGATCTTAATATATTCAGTTCCAC
ATTATTGGTGCTAGTAGGAGACATAATGAAAACAGTTAAATGAAATCCACAGCGAGTATACTGATTAA
CCAGTACTGTCAAATTTCTCATACCTATTGAATTTTAACTACTGACAAAATGAGCAGTAACAATTCCAT
TTACCTGATTGTCCTTTGGCAAAGGATATTATTAAGAATCACTAAAAATAGCCATAAAGAAGCCATAT
GGAAGGAAGAAGGAAAACAAATGGCATGAAAAGGTCTCTCACTGAGTAACTATGCTCTTATAGTTGA
CGCTGGTATATTTCTTTTATTCACTACCTAAAAATGAACTATCTTACTCTTTAATTATAGAATAAAAAC
TGCAGGAAAGTATTTAAGACTTTTTTTCACAAACACAGGTATCTCATTAACCTATGTTTTATTTTGAGT
AAATTCATTATTCATTATTTCACATTATAAAAAGTAACCACACATACATATGCATTCACAAATTAGATC
ATCTTTATCATACATCAATATATTTTAAAAAACAAATATCTTCTAATATCAATATAGTTATATGCTGAT
TGCATTTTGAAATAGAGAAGCTGACAATAGCTTCACACGGTATATCTCAAGAACTGACAGTTTAAAAT
TAAGAACTGTATATATTCCACAGGCAAATTTTGATGGAAATATTAGCATTAGTACAAATAAATGCTGT
TGACATAGCTTAAGCATGATAGCTTGGAATAACAGCTGATTCAGACTAGATTCATCATTTTAAATAAA
GACAAGTACAATCTAAAATGTAAACAAAGTATTTATAAAATAAATTCTCTAGGAAATAAAGAAAATC
ATCAATCTATTATTTTTAAGGTATTTATAGCTCAAAGTTACCAGAAATCTTTGTGGAATTTTCACTGCC
AAATTTAAATTTGGGAATGTCCGGGTACAACATATTGTCACCACAATCCGGAGGGCCGCCAAAATCGC
AGACGGCTATTTGCATCCTTTCAGTGTGACTTTTCAAGTGGGCTTGGAGACTCATGAGAAAATGCAGT
ATCTTTCTCACCTTCCAAGTCCCCCTCCAAGTGCTTATCAAGCTAGGACAATTCAGCTGATGTAGACTT
TCATACGATTTTTAAATGCTAAAACTCTAGAACAATTAAATGGCTGGTTTCCTGCACAAATAAATGCA
GACTTGTCTCTTTTGCAGCAGTGGTTAAAGCACATTCCTAGAGATGTTTTTCATTACACTTCACTATAA
CATTGGAATTCCGTAACCACATTATTACTCAAGAAATATATATTATACCTCCTAGGGAATCTAATTTGA
AATATGAAAAGTTTAACATCAGCTGTCATTATGTCTCTCTTTCTGCTCATTAACAACAACAAAAAAAA
AAACCCAAAATTTAAAAACAAAGCCCCAGCCACTGCTTTAGCTTTTGTGTACCAATCACATTATCTCCT
GCTGCCTTTGTTTTGCCTCCTTCATCAAGCAGTTGATTTAAGGATTGGATTTTCTGGATTTTCTTTGGGA
AGAAAGAAATGAAGGAAGAGAGGGAGGGTGGGGAAGGAGGGAGTGAGAAAGGGAGAAAAAGAAAA
AAATATGAAAAATGTTATTCATATAATGTGTACAAAGTAAATTAAAAATATATAGATACTCTACTTTG
AATAATTCTAATATATGAGAAGT

[0097] The inventors employed network analysis that allows them to allocate multiple genes or proteins to a smaller number of driver processes; and to mine these processes for impactful drug targets. The approach takes advantage of information that is usually ignored in standard gene set analyses—the known and predicted interactions between genes (and proteins) and the inclusion of other genes in the same or related pathways. In particular, the inventors analysed the blood coagulation process in humans using network models which highlighted ZPI as a preferred target for haemophilia, as well as highlighting an existing drug target-antithrombin 3 (AT3, the target of Fitusiran), thereby also validating the network approach. Experimental confirmation that inhibition of ZPI is indeed a viable strategy for the treatment of haemophilia is provided in Example 9.

[0098] The inhibition disclosed herein may be of the gene or protein resulting from expression of the gene and reference to ZPI hereby explicitly incorporates a reference to inhibition of the expression or function of the gene and, separately, of the protein product.

### Definitions

[0099] The “first strand”, also called the antisense strand or guide strand herein and which can be used interchangeably herein, refers to the nucleic acid strand, e.g. the strand of an siRNA, e.g. a dsiRNA, which includes a region that is substantially complementary to a target sequence, e.g. to an mRNA. As used herein, the term “region of complementarity” refers to the region on the antisense strand that is substantially complementary to a sequence, for example a target sequence. Where the region of complementarity is not fully complementary to the target sequence, the mismatches can be in the internal or terminal regions of the molecule. In some embodiments, a double stranded nucleic acid e.g. an siRNA agent of the invention includes a nucleotide mismatch in the antisense strand.

[0100] The “second strand” (also called the sense strand or passenger strand herein, and which can be used interchangeably herein), refers to the strand of a nucleic acid e.g. siRNA that includes a region that is substantially complementary to a region of the antisense strand as that term is defined herein.

[0101] In the context of molecule comprising a nucleic acid provided with a ligand moiety, optionally also with a linker moiety, the nucleic acid of the invention may be referred to as an oligonucleotide moiety or oligonucleoside moiety

[0102] Oligonucleotides are short nucleic acid polymers. Whilst oligonucleotides contain phosphodiester bonds between the nucleoside component thereof (base plus sugar), the present invention is not limited to oligonucleotides always joined by such a phosphodiester bond between adjacent nucleosides, and other oligomers of nucleosides joined by bonds which are bonds other than a phosphate bond are contemplated. For example, a bond between nucleotides may be a phosphorothioate bond. Therefore, the term “oligonucleoside” herein covers both oligonucleotides and other oligomers of nucleosides. An oligonucleoside which is a nucleic acid having at least a portion which is an oligonucleotide is preferred according to the present invention. An oligonucleoside having one or more, or a majority of, phosphodiester backbone bonds between nucleosides is also preferred according to the present invention. An oligonucleoside having one or more, or a majority of, phosphodiester backbone bonds between nucleosides, and also having one or more phosphorothioate backbone bonds between nucleosides (typically in a terminal region of the first and/or second strands) is also preferred according to the present invention.

[0103] In some embodiments, a double stranded nucleic acid e.g. siRNA agent of the invention includes a nucleoside mismatch in the sense strand. In some embodiments, the nucleoside mismatch is, for example, within 5, 4, 3, 2, or 1 nucleosides from the 3′-end of the nucleic acid e.g. siRNA.

[0104] In another embodiment, the nucleoside mismatch is, for example, in the 3′-terminal nucleoside of the nucleic acid e.g. siRNA.

[0105] A “target sequence” (which may be called a target RNA or a target mRNA) refers to a contiguous portion of the nucleoside sequence of an mRNA molecule formed during the transcription of a gene, including mRNA that is a product of RNA processing of a primary transcription product, or can be a contiguous portion of the nucleotide sequence of any RNA molecule such as a LNCRNA which it is desired to inhibit.

[0106] The target sequence may be from about 10-35 nucleosides in length, e.g., about 15-30 nucleosides in length. For example, the target sequence can be from about 15-30 nucleosides, 15-29, 15-28, 15-27, 15-26, 15-25, 15-24, 15-23, 15-22, 15-21, 15-20, 15-19, 15-18, 15-17, 18-30, 18-29, 18-28, 18-27, 18-26, 18-25, 18-24, 18-23, 18-22, 18-21, 18-20, 19-30, 19-29, 19-28, 19-27, 19-26, 19-25, 19-24, 19-23, 19-22, 19-21, 19-20, 20-30, 20-29, 20-28, 20-27, 20-26, 20-25, 20-24, 20-23, 20-22, 20-21, 21-30, 21-29, 21-28, 21-27, 21-26, 21-25, 21-24, 21-23, or 21-22 nucleosides in length. Ranges and lengths intermediate to the above recited ranges and lengths are also contemplated to be part of the invention.

[0107] The term “ribonucleoside” or “nucleoside” can also refer to a modified nucleoside as further detailed below.

[0108] A nucleic acid can be a DNA or an RNA, and can comprise modified nucleosides. RNA is a preferred nucleic acid.

[0109] The terms “iRNA”, “siRNA”, “RNAi agent,” and “iRNA agent,” “RNA interference agent” as used interchangeably herein, refer to an agent that contains RNA, and which mediates the targeted cleavage of an RNA transcript via an RNA-induced silencing complex (RISC) pathway. siRNA directs the sequence-specific degradation of mRNA through RNA interference (RNAi).

[0110] A double stranded RNA is referred to herein as a “double stranded siRNA (dsiRNA) agent”, “double stranded siRNA (dsiRNA) molecule”, “double stranded RNA (dsRNA) agent”, “double stranded RNA (dsRNA) molecule”, “dsiRNA agent”, “dsiRNA molecule”, or “dsiRNA”, which refers to a complex of ribonucleic acid molecules, having a duplex structure comprising two anti-parallel and substantially complementary nucleic acid strands, referred to as having “sense” and “antisense” orientations with respect to a target RNA. The majority of nucleosides of each strand of the nucleic acid, e.g. a dsRNA molecule, are preferably ribonucleosides, but in that case each or both strands can also include one or more non-ribonucleosides, e.g., a deoxyribonucleoside or a modified ribonucleoside. In addition, as used in this specification, an “siRNA” may include ribonucleosides with chemical modifications.

[0111] The term “modified nucleoside” refers to a nucleoside having, independently, a modified sugar moiety, a modified internucleoside linkage, or modified nucleobase, or any combination thereof. Thus, the term modified nucleoside encompasses substitutions, additions or removal of, e.g., a functional group or atom, to internucleoside linkages, sugar moieties, or nucleobases. Any such modifications, as used in a siRNA type molecule, are encompassed by “iRNA” or “RNAi agent” or “siRNA” or “siRNA agent” for the purposes of this specification and claims.

[0112] The duplex region of a nucleic acid of the invention e.g. a dsRNA may range from about 9 to 40 base pairs in length such as 9 to 36 base pairs in length, e.g., about 15-30 base pairs in length, for example, about 9, 10, 11, 12, 13, 14, 15, 16, 17, 18, 19, 20, 21, 22, 23, 24, 25, 26, 27, 28, 29, 30, 31, 32, 33, 34, 35, or 36 base pairs in length, such as about 15-30, 15-29, 15-28, 15-27, 15-26, 15-25, 15-24, 15-23, 15-22, 15-21, 15-20, 15-19, 15-18, 15-17, 18-30, 18-29, 18-28, 18-27, 18-26, 18-25, 18-24, 18-23, 18-22, 18-21, 18-20, 19-30, 19-29, 19-28, 19-27, 19-26, 19-25, 19-24, 19-23, 19-22, 19-21, 19-20, 20-30, 20-29, 20-28, 20-27, 20-26, 20-25, 20-24,20-23, 20-22, 20-21, 21-30, 21-29, 21-28, 21-27, 21-26, 21-25, 21-24, 21-23, or 21-22 base pairs in length.

[0113] The two strands forming the duplex structure may be different portions of one larger molecule, or they may be separate molecules e.g. RNA molecules.

[0114] The term “nucleoside overhang” refers to at least one unpaired nucleoside that extends from the duplex structure of a double stranded nucleic acid. A ds nucleic acid can comprise an overhang of at least one nucleoside; alternatively the overhang can comprise at least two nucleosides, at least three nucleosides, at least four nucleosides, at least five nucleosides, or more. A nucleoside overhang can comprise or consist of a nucleoside analog, including a deoxynucleoside. The overhang(s) can be on the sense strand, the antisense strand, or any combination thereof. Furthermore, the/nucleoside(s) of an overhang can be present on the 5′-end, 3′-end, or both ends of either an antisense or sense strand.

[0115] In certain embodiments, the antisense strand has a 1-10 nucleoside, e.g., 0-3, 1-3, 2-4, 2-5, 4-10, 5-10, 1, 2, 3, 4, 5, 6, 7, 8, 9, or 10 nucleoside overhang at the 3′-end or the 5′-end.

[0116] “Blunt” or “blunt end” means that there are no unpaired nucleoside at that end of the double stranded nucleic acid, i.e., no nucleoside overhang. The nucleic acids of the invention include those with no nucleoside overhang at one end or with no nucleoside overhangs at either end.

[0117] Unless otherwise indicated, the term “complementary,” when used to describe a first nucleoside sequence in relation to a second nucleoside sequence, refers to the ability of an oligonucleoside comprising the first nucleoside sequence to hybridize and form a duplex structure under certain conditions with an oligonucleoside or polynucleoside comprising the second nucleoside sequence, as will be understood by the skilled person. Such conditions can, for example, be stringent conditions, where stringent conditions can include: 400 mM NaCl, 40 mM PIPES pH 6.4, 1 mM EDTA, 50° C. or 70° C. for 12-16 hours followed by washing (see, e.g., “Molecular Cloning: A Laboratory Manual, Sambrook, et al. (1989) Cold Spring Harbor Laboratory Press).

[0118] Complementary sequences within nucleic acid e.g. a dsiRNA, as described herein, include base-pairing of the oligonucleoside or polynucleoside comprising a first nucleoside sequence to an oligonucleoside or polynucleoside comprising a second nucleoside sequence over the entire length of one or both nucleoside sequences. Such sequences can be referred to as “fully complementary” with respect to each other herein. However, where a first sequence is referred to as “substantially complementary” or “partially complementary” with respect to a second sequence herein, the two sequences can be fully complementary, or they can form one or more mismatched base pairs, such as 2, 4, or 5 mismatched base pairs, but preferably not more than 5, while retaining the ability to hybridize under the conditions most relevant to their ultimate application, e.g., inhibition of gene expression via a RISC pathway. Overhangs shall not be regarded as mismatches with regard to the determination of complementarity. For example, a nucleic acid e.g. dsRNA comprising one oligonucleoside 17 nucleosides in length and another oligonucleoside 19 nucleosides in length, wherein the longer oligonucleoside comprises a sequence of 17 nucleosides that is fully complementary to the shorter oligonucleoside, can yet be referred to as “fully complementary”.

[0119] “Complementary” sequences, as used herein, can also include, or be formed entirely from, non-Watson-Crick base pairs or base pairs formed from non-natural and modified nucleosides, in so far as the above requirements with respect to their ability to hybridize are fulfilled. Such non-Watson-Crick base pairs include, but are not limited to, G:U Wobble or Hoogstein base pairing.

[0120] The terms “complementary,” “fully complementary” and “substantially/partially complementary” herein can be used with respect to the base matching between the sense strand and the antisense strand of a nucleic acid e.g. dsiRNA, or between the antisense strand of a double stranded nucleic acid e.g. siRNA agent and a target sequence.

[0121] Within the present invention, the second strand of the nucleic acid according to the invention, in particular a dsiRNA for inhibiting ZPI, is at least partially complementary to the first strand of said nucleic acid. In certain embodiments, a first and second strand of a nucleic acid according to the invention are partially complementary if they form a duplex region having a length of at least 17 base pairs and comprising not more than 1, 2, 3, 4, or 5 mismatched base pairs.

[0122] In certain embodiments, a first and second strand of the nucleic acid according to the invention are partially complementary if they form a duplex region having a length of 19 base pairs and comprising not more than 1, 2, 3, 4, or 5 mismatched base pairs. In certain embodiments, a first and second strand of the nucleic acid according to the invention are partially complementary if they form a duplex region having a length of 21 base pairs comprising not more than 1, 2, 3, 4, or 5 mismatched base pairs.

[0123] Alternatively, a first and second strand of the nucleic acid according to the invention are partially complementary if they form a duplex region having a length of at least 17 base pairs, wherein at least 14, 15, 16 or 17 of said base pairs are complementary base pairs, in particular Watson-Crick base pairs.

[0124] In certain embodiments, a first and second strand of the nucleic acid according to the invention are partially complementary if they form a duplex region having a length of 19 base pairs, wherein at least 14, 15, 16, 17, 18 or all 19 base pairs are complementary base pairs, in particular Watson-Crick base pairs. In certain embodiments, a first and second strand of the nucleic acid according to the invention are partially complementary if they form a duplex region having a length of 21 base pairs, wherein at least 16, 17, 18, 19, 20 or all 21 base pairs are complementary base pairs, in particular Watson-Crick base pairs. As used herein, a nucleic acid that is “substantially complementary” or “partially complementary” to at least part of a messenger RNA (mRNA) refers to a polynucleoside that is substantially or partially complementary to a contiguous portion of the mRNA of interest (e.g., an mRNA encoding a gene). In certain embodiments, the contiguous portion of the mRNA is a sequence as listed in Table 1, i.e., any one of SEQ ID NOs:2-121. For example, a polynucleoside is complementary to at least a part of an mRNA of a gene of interest if the sequence is substantially or partially complementary to a non-interrupted portion of an mRNA encoding that gene.

[0125] Accordingly, in some preferred embodiments, the antisense oligonucleosides as disclosed herein are fully complementary to the target gene sequence.

[0126] In other embodiments, the antisense oligonucleosides disclosed herein are substantially or partially complementary to a target RNA sequence and comprise a contiguous nucleoside sequence which is at least about 80% complementary over its entire length to the equivalent region of the target RNA sequence, such as at least about 85%, 86%, 87%, 88%, 89%, about 90%, 91%, 92%, 93%, 94%, 95%, 96%, 97%, 98%, or 99% complementary or 100% complementary.

[0127] In certain embodiments, the first (antisense) strand of a nucleic acid according to the invention is partially or fully complementary to a contiguous portion of RNA transcribed from the ZPI gene. In certain embodiments, the first strand of the nucleic acid according to the invention is partially or fully complementary to a contiguous portion of at least 17 nucleosides of the ZPI mRNA. In certain embodiments, the first strand of the nucleic acid according to the invention is partially or fully complementary to a contiguous portion of 17, 18, 19, 20, 21, 22 or 23 nucleosides of the ZPI mRNA. In certain embodiments, the first strand of the nucleic acid according to the invention is partially or fully complementary to a contiguous portion of 17, 18, 19, 20, 21, 22 or 23 nucleosides of any one of the sequences as listed in Table 1, i.e., any one of SEQ ID NOs: 2-121.

[0128] In certain embodiments, the first (antisense) strand of the nucleic acid according to the invention is partially complementary to a contiguous portion of the ZPI mRNA if it comprises a contiguous nucleoside sequence of at least 17 nucleosides, wherein at least 14, 15, 16 or 17 nucleosides of said contiguous nucleoside sequence are complementary to a contiguous portion of the ZPI mRNA. In certain embodiments, the first strand of the nucleic acid according to the invention comprises a contiguous nucleoside sequence of at least 17 nucleosides, wherein at least 14, 15, 16 or 17 nucleosides of said contiguous nucleoside sequence are complementary to a contiguous portion of any one of the sequences listed in Table 1, i.e., any one of SEQ ID NOs: 2-121. In certain embodiments, the first strand of the nucleic acid according to the invention comprises a contiguous nucleoside sequence of 19 nucleosides, wherein at least 14, 15, 16, 17, 18 or all 19 nucleosides of said contiguous nucleoside sequence are complementary to a contiguous portion of any one of the sequences listed in Table 1, i.e., any one of SEQ ID NOs: 2-121. In certain embodiments, the first strand of the nucleic acid according to the invention comprises a contiguous nucleoside sequence of 23 nucleosides, wherein at least 18, 19, 20, 21, 22 or all 23 nucleosides of said contiguous nucleoside sequence are complementary to a contiguous portion of any one of the sequences listed in Table 1, i.e., any one of SEQ ID NOs: 2-101.

[0129] In some embodiments, a nucleic acid e.g. an siRNA of the invention includes a sense strand that is substantially or partially complementary to an antisense polynucleoside which, in turn, is complementary to a target gene sequence and comprises a contiguous nucleoside sequence which is at least about 80% complementary over its entire length to the equivalent region of the nucleoside sequence of the antisense strand, such as about 85%, 86%, 87%, 88%, 89%, 90%, 91%, 92%, 93%, 94%, 95%, 96%, 97%, 98%, or 99% complementary, or 100% complementary.

[0130] In some embodiments, a nucleic acid e.g. an siRNA of the invention includes an antisense strand that is substantially or partially complementary to the target sequence and comprises a contiguous nucleoside sequence which is at least 80% complementary over its entire length to the target sequence such as about 85%, 86%, 87%, 88%, 89%, 90%, 91%, 92%, 93%, 94%, 95%, 96%, 97%, 98%, or 99% complementary, or 100% complementary.

[0131] As used herein, a “subject” is an animal, such as a mammal, including a primate (such as a human, a non-human primate, e.g., a monkey, and a chimpanzee), or a non-primate or a bird that expresses the target gene, either endogenously or heterologously, when the target gene sequence has sufficient complementarity to the nucleic acid e.g. iRNA agent to promote target knockdown. In certain preferred embodiments, the subject is a human.

[0132] The terms “treating” or “treatment” refer to a beneficial or desired result including, but not limited to, alleviation or amelioration of one or more symptoms associated with gene expression. “Treatment” can also mean prolonging survival as compared to expected survival in the absence of treatment. Treatment can include prevention of development of co-morbidities, e.g.reduced liver damage in a subject with a hepatic infection.

[0133] “Therapeutically effective amount,” as used herein, is intended to include the amount of a nucleic acid e.g. an iRNA that, when administered to a patient for treating a subject having disease, is sufficient to effect treatment of the disease (e.g., by diminishing, ameliorating or maintaining the existing disease or one or more symptoms of disease or its related comorbidities).

[0134] The phrase “pharmaceutically acceptable” is employed herein to refer to compounds, materials, compositions, or dosage forms which are suitable for use in contact with the tissues of human subjects and animal subjects without excessive toxicity, irritation, allergic response, or other problem or complication, commensurate with a reasonable benefit/risk ratio.

[0135] The phrase “pharmaceutically-acceptable carrier” as used herein means a pharmaceutically-acceptable material, composition, or vehicle, such as a liquid or solid filler, diluent, excipient, manufacturing aid or solvent encapsulating material, involved in carrying or transporting the subject compound from one organ, or portion of the body, to another organ, or portion of the body. Each carrier must be “acceptable” in the sense of being compatible with the other ingredients of the formulation and not injurious to the subject being treated.

[0136] Where a value or range of values of a parameter are recited, it is intended that values and ranges intermediate to the recited values are also intended to be part of this invention.

[0137] The articles “a” and “an” are used herein to refer to one or to more than one (i.e. to at least one) of the grammatical object of the article.

[0138] The term “including” is used herein to mean, and is used interchangeably with, the phrase “including but not limited to”.

[0139] The term “or” is used herein to mean, and is used interchangeably with, the term “and/or,” unless context clearly indicates otherwise. For example, “sense strand or antisense strand” is understood as “sense strand or antisense strand or sense strand and antisense strand.”

[0140] The term “about” is used herein to mean within the typical ranges of tolerances in the art. For example, “about” can be understood as about 2 standard deviations from the mean. In certain embodiments, about means+10%. In certain embodiments, about means+5%. When about is present before a series of numbers or a range, it is understood that “about” can modify each of the numbers in the series or range.

[0141] The term “at least” prior to a number or series of numbers is understood to include the number adjacent to the term “at least”, and all subsequent numbers or integers that could logically be included, as clear from context. For example, the number of nucleotides in a nucleic acid molecule must be an integer. For example, “at least 18 nucleosides of a 21 nucleoside nucleic acid molecule” means that 18, 19, 20, or 21 nucleosides have the indicated property. When at least is present before a series of numbers or a range, it is understood that “at least” can modify each of the numbers in the series or range.

[0142] As used herein, “no more than” or “less than” is understood as the value adjacent to the phrase and logical lower values or integers, as logical from context, to zero. For example, a duplex with an overhang of “no more than 2 nucleosides” has a 2, 1, or 0 nucleoside overhang. When “no more than” is present before a series of numbers or a range, it is understood that “no more than” can modify each of the numbers in the series or range.

[0143] The terminal region of a strand is the last 5 nucleotides from the 5′ or the 3′ end.

[0144] A nucleobase sequence is the sequence of the bases of the nucleic acid in an oligomer.

[0145] Various embodiments of the invention can be combined as determined appropriate by one of skill in the art.

### Target

[0146] A target for inhibition disclosed herein may be, without limitation, an mRNA, polypeptide, protein, or gene.

[0147] These targets are a target the inhibition of which helps in the prevention or treatment of a disease related to a disorder of haemostasis, such as haemophilia.

[0148] The target for inhibition is ZPI, and inhibition may be effected by inhibition of expression or function of the ZPI gene or protein or both.

[0149] In a preferred embodiment, the target in an mRNA expressed from the ZPI gene. Exemplary target sequences on the ZPI mRNA are listed below in Table 1.

TABLE 1

| | Oligonucleotide mRNA target | Starting position |
|---|---|---|
| SEQ ID NO | sequence 5′→3′ | on NM_016186.3 |
| SEQ ID NO: 2 | UUUGCCUUCAUCCACAAGGAUUU | 991 |
| SEQ ID NO: 3 | GCUGCGAAAGAUCUCCAUGAGGC | 756 |
| SEQ ID NO: 4 | AUGCUGGUGGUCCUCAUGGAGAA | 1390 |
| SEQ ID NO: 5 | CUGCGAAAGAUCUCCAUGAGGCA | 757 |
| SEQ ID NO: 6 | AAGUAUGAGAUGCAUGAGCUGCU | 1531 |
| SEQ ID NO: 7 | CUGUUUGAUGAGAUUAAUCCUGA | 1156 |
| SEQ ID NO: 8 | GAUGAGAUUAAUCCUGAAACCAA | 1162 |
| SEQ ID NO: 9 | UUUGAUGAGAUUAAUCCUGAAAC | 1159 |
| SEQ ID NO: 10 | UGAUGAGAUUAAUCCUGAAACCA | 1161 |
| SEQ ID NO: 11 | UUGAUGAGAUUAAUCCUGAAACC | 1160 |
| SEQ ID NO: 12 | AACUGUUUGAUGAGAUUAAUCCU | 1154 |
| SEQ ID NO: 13 | AGUUUUGCCUUCAUCCACAAGGA | 988 |
| SEQ ID NO: 14 | UGCGAAAGAUCUCCAUGAGGCAC | 758 |
| SEQ ID NO: 15 | CAUGCUGGUGGUCCUCAUGGAGA | 1389 |
| SEQ ID NO: 16 | UGCCUUCAUCCACAAGGAUUUUG | 993 |
| SEQ ID NO: 17 | GCGAAAGAUCUCCAUGAGGCACG | 759 |
| SEQ ID NO: 18 | CCUUCAUCCACAAGGAUUUUGAU | 995 |
| SEQ ID NO: 19 | UGUUUGAUGAGAUUAAUCCUGAA | 1157 |
| SEQ ID NO: 20 | UUUUGCCUUCAUCCACAAGGAUU | 990 |
| SEQ ID NO: 21 | AAGAUCUCCAUGAGGCACGAUGG | 763 |
| SEQ ID NO: 22 | ACCAUGCUGGUGGUCCUCAUGGA | 1387 |
| SEQ ID NO: 23 | GUUUUGCCUUCAUCCACAAGGAU | 989 |
| SEQ ID NO: 24 | UUGCCUUCAUCCACAAGGAUUUU | 992 |
| SEQ ID NO: 25 | CCUACCAAGGAAAUGCCACCAUG | 1370 |
| SEQ ID NO: 26 | GUUUGAUGAGAUUAAUCCUGAAA | 1158 |
| SEQ ID NO: 27 | GCCUUCAUCCACAAGGAUUUUGA | 994 |
| SEQ ID NO: 28 | CGAAAGAUCUCCAUGAGGCACGA | 760 |
| SEQ ID NO: 29 | ACUGUUUGAUGAGAUUAAUCCUG | 1155 |
| SEQ ID NO: 30 | CCAUGCUGGUGGUCCUCAUGGAG | 1388 |
| SEQ ID NO: 31 | GAGUUUUGCCUUCAUCCACAAGG | 987 |
| SEQ ID NO: 32 | UGCCACCAUGCUGGUGGUCCUCA | 1383 |
| SEQ ID NO: 33 | GCCACCAUGCUGGUGGUCCUCAU | 1384 |
| SEQ ID NO: 34 | GAAAGAUCUCCAUGAGGCACGAU | 761 |
| SEQ ID NO: 35 | GGAGUUUUGCCUUCAUCCACAAG | 986 |
| SEQ ID NO: 36 | CCACCAUGCUGGUGGUCCUCAUG | 1385 |
| SEQ ID NO: 37 | AAAGAUCUCCAUGAGGCACGAUG | 762 |
| SEQ ID NO: 38 | CACCAUGCUGGUGGUCCUCAUGG | 1386 |
| SEQ ID NO: 39 | UUUGCCUCCACCUUUGACAAGAA | 1321 |
| SEQ ID NO: 40 | UGCCUCCACCUUUGACAAGAAUU | 1323 |
| SEQ ID NO: 41 | ACCAUUAAGGUGCCCAUGAUGUA | 1285 |
| SEQ ID NO: 42 | AACUGCCCUACCAAGGAAAUGCC | 1364 |
| SEQ ID NO: 43 | CUCAAACUGCCCUACCAAGGAAA | 1360 |
| SEQ ID NO: 44 | CCUCAAACUGCCCUACCAAGGAA | 1359 |
| SEQ ID NO: 45 | GCCUCCACCUUUGACAAGAAUUU | 1324 |
| SEQ ID NO: 46 | GUCGACACUUUCCACCUGGACAA | 1255 |
| SEQ ID NO: 47 | ACACUUUCCACCUGGACAAGUAC | 1259 |
| SEQ ID NO: 48 | UCAAACUGCCCUACCAAGGAAAU | 1361 |
| SEQ ID NO: 49 | AAACUGCCCUACCAAGGAAAUGC | 1363 |
| SEQ ID NO: 50 | GACACUUUCCACCUGGACAAGUA | 1258 |
| SEQ ID NO: 51 | GACCAUUAAGGUGCCCAUGAUGU | 1284 |
| SEQ ID NO: 52 | GUUUGCCUCCACCUUUGACAAGA | 1320 |
| SEQ ID NO: 53 | ACUUUCCACCUGGACAAGUACAA | 1261 |
| SEQ ID NO: 54 | UGUCCUCAAACUGCCCUACCAAG | 1356 |
| SEQ ID NO: 55 | CAAACUGCCCUACCAAGGAAAUG | 1362 |
| SEQ ID NO: 56 | GUCCUCAAACUGCCCUACCAAGG | 1357 |
| SEQ ID NO: 57 | AUGUCCUCAAACUGCCCUACCAA | 1355 |
| SEQ ID NO: 58 | UCGACACUUUCCACCUGGACAAG | 1256 |
| SEQ ID NO: 59 | AGUUUGCCUCCACCUUUGACAAG | 1319 |
| SEQ ID NO: 60 | CGACACUUUCCACCUGGACAAGU | 1257 |
| SEQ ID NO: 61 | CUUUCCACCUGGACAAGUACAAG | 1262 |
| SEQ ID NO: 62 | CACUUUCCACCUGGACAAGUACA | 1260 |
| SEQ ID NO: 63 | UCCUCAAACUGCCCUACCAAGGA | 1358 |
| SEQ ID NO: 64 | GAUUACAUCUUGUUCAAAGGGAA | 1198 |
| SEQ ID NO: 65 | AAUGCCACCAUGCUGGUGGUCCU | 1381 |
| SEQ ID NO: 66 | UUUAUCCAAGAGGUAUUUUGAUA | 1038 |
| SEQ ID NO: 67 | GGAAAUGCCACCAUGCUGGUGGU | 1378 |
| SEQ ID NO: 68 | GGAUUACAUCUUGUUCAAAGGGA | 1197 |
| SEQ ID NO: 69 | AUCUCCAUGAGGCACGAUGGCAA | 766 |
| SEQ ID NO: 70 | AUUCCAUGCCUCCUGUCAUCAAA | 1721 |
| SEQ ID NO: 71 | UUAUUCCAUGCCUCCUGUCAUCA | 1719 |
| SEQ ID NO: 72 | ACCAAGGAAAUGCCACCAUGCUG | 1373 |
| SEQ ID NO: 73 | GCUGGUGGUCCUCAUGGAGAAAA | 1392 |
| SEQ ID NO: 74 | ACAUCUUGUUCAAAGGGAAAUGG | 1202 |
| SEQ ID NO: 75 | CCAAGGAAAUGCCACCAUGCUGG | 1374 |
| SEQ ID NO: 76 | UUGCCUCCACCUUUGACAAGAAU | 1322 |
| SEQ ID NO: 77 | GGGAGUUUUGCCUUCAUCCACAA | 985 |
| SEQ ID NO: 78 | CUGCUGCGAAAGAUCUCCAUGAG | 754 |
| SEQ ID NO: 79 | CAAGUUUGCCUCCACCUUUGACA | 1317 |
| SEQ ID NO: 80 | AAGUUUGCCUCCACCUUUGACAA | 1318 |
| SEQ ID NO: 81 | UACAUCUUGUUCAAAGGGAAAUG | 1201 |
| SEQ ID NO: 82 | GGGGAGUUUUGCCUUCAUCCACA | 984 |
| SEQ ID NO: 83 | UGCUGCGAAAGAUCUCCAUGAGG | 755 |
| SEQ ID NO: 84 | UUCCAUGCCUCCUGUCAUCAAAG | 1722 |
| SEQ ID NO: 85 | UCUGUUUCUGGGCAGGGUGGUGA | 1794 |
| SEQ ID NO: 86 | CAGCCUGCUGCGAAAGAUCUCCA | 750 |
| SEQ ID NO: 87 | CAAACUGUUUGAUGAGAUUAAUC | 1152 |
| SEQ ID NO: 88 | CCAUGCCUCCUGUCAUCAAAGUG | 1724 |
| SEQ ID NO: 89 | GAAGUAUGAGAUGCAUGAGCUGC | 1530 |
| SEQ ID NO: 90 | AGAAGUAUGAGAUGCAUGAGCUG | 1529 |
| SEQ ID NO: 91 | CAUGUCCUCAAACUGCCCUACCA | 1354 |
| SEQ ID NO: 92 | AAACUGUUUGAUGAGAUUAAUCC | 1153 |
| SEQ ID NO: 93 | AAGACCAUUAAGGUGCCCAUGAU | 1282 |
| SEQ ID NO: 94 | AGACCAUUAAGGUGCCCAUGAUG | 1283 |
| SEQ ID NO: 95 | CUGUUUCUGGGCAGGGUGGUGAA | 1795 |
| SEQ ID NO: 96 | GCUUCUGUUUCUGGGCAGGGUGG | 1791 |
| SEQ ID NO: 97 | AGUUUUCUUUCCGAAGUUCAAGC | 1500 |
| SEQ ID NO: 98 | GUUUUCUUUCCGAAGUUCAAGCU | 1501 |
| SEQ ID NO: 99 | CUUCUGUUUCUGGGCAGGGUGGU | 1792 |
| SEQ ID NO: 100 | UCAUGUCCUCAAACUGCCCUACC | 1353 |
| SEQ ID NO: 101 | AGUCGACACUUUCCACCUGGACA | 1254 |
| SEQ ID NO: 102 | CCUUCAUCCACAAGGAUUU | 995 |
| SEQ ID NO: 103 | CGAAAGAUCUCCAUGAGGC | 760 |
| SEQ ID NO: 104 | UGGUGGUCCUCAUGGAGAA | 1394 |
| SEQ ID NO: 105 | GAAAGAUCUCCAUGAGGCA | 761 |
| SEQ ID NO: 106 | AUGAGAUGCAUGAGCUGCU | 1535 |
| SEQ ID NO: 107 | UUGAUGAGAUUAAUCCUGA | 1160 |
| SEQ ID NO: 108 | AGAUUAAUCCUGAAACCAA | 1166 |
| SEQ ID NO: 109 | AUGAGAUUAAUCCUGAAAC | 1163 |
| SEQ ID NO: 110 | GAGAUUAAUCCUGAAACCA | 1165 |
| SEQ ID NO: 111 | UGAGAUUAAUCCUGAAACC | 1164 |
| SEQ ID NO: 112 | GUUUGAUGAGAUUAAUCCU | 1158 |
| SEQ ID NO: 113 | UUGCCUUCAUCCACAAGGA | 992 |
| SEQ ID NO: 114 | AAAGAUCUCCAUGAGGCAC | 762 |
| SEQ ID NO: 115 | CUGGUGGUCCUCAUGGAGA | 1393 |
| SEQ ID NO: 116 | UUCAUCCACAAGGAUUUUG | 997 |
| SEQ ID NO: 117 | AAGAUCUCCAUGAGGCACG | 763 |
| SEQ ID NO: 118 | CAUCCACAAGGAUUUUGAU | 999 |
| SEQ ID NO: 119 | UGAUGAGAUUAAUCCUGAA | 1161 |
| SEQ ID NO: 120 | GCCUUCAUCCACAAGGAUU | 994 |
| SEQ ID NO: 121 | UCUCCAUGAGGCACGAUGG | 767 |

[0150] It is to be understood that SEQ ID NOs: 2 to 121 relate to human (Homo sapiens) mRNA sequences.

### Disease/Conditions

[0151] The invention relates to an inhibitor suitable for use, or for use, in treatment of a disease related to a disorder of haemostasis, such as haemophilia.

[0152] Haemophilia, or hemophilia is a mostly inherited genetic disorder that impairs the body's ability to make blood clots, a process needed to stop bleeding. This results in subjects bleeding for a longer time after an injury, easy bruising, and an increased risk of bleeding inside joints or the brain. Subjects with a mild case of the disease may have symptoms only after an accident or during surgery. Bleeding into a joint can result in permanent damage while bleeding in the brain can result in long term headaches, seizures, or a decreased level of consciousness.

[0153] There are two main types of haemophilia: haemophilia A, which occurs due to low amounts of clotting factor VIII, and haemophilia B, which occurs due to low levels of clotting factor IX. They are typically inherited from one's parents through an X chromosome carrying a nonfunctional gene. Rarely a new mutation may occur during early development or haemophilia may develop later in life due to antibodies forming against a clotting factor. Other types include haemophilia C, which occurs due to low levels of factor XI, Von Willebrand disease, which occurs due to low levels of a substance called von Willebrand factor, and parahaemophilia, which occurs due to low levels of factor V. Haemophilia A, B, and C prevent the intrinsic pathway from functioning properly; this clotting pathway is necessary when there is damage to the endothelium of a blood vessel. Acquired haemophilia is associated with cancers, autoimmune disorders, and pregnancy. Diagnosis is by testing the blood for its ability to clot and its levels of clotting factors.

[0154] In certain embodiments, the inhibitor of the present invention is suitable for treatment, or for treatment of haemophilia A, B and/or C. In certain embodiments, the inhibitor of the present invention is suitable for treatment, or for treatment of haemophilia A and/or B. In certain embodiments, the inhibitor of the present invention is suitable for treatment, or for treatment of acquired haemophilia. In certain embodiments, the inhibitor of the present invention is suitable for treatment, or for treatment of Willebrand disease. In certain embodiments, the inhibitor of the present invention is suitable for treatment, or for treatment of parahaemophilia.

[0155] Without wishing to being bound by theory, treatment with the inhibitor of the invention results in a boost of clotting factor levels such that bleeding can be reduced or prevented, as demonstrated herein in FIG. 10. Thus, in a preferred embodiment, treatment with the inhibitor of the invention reduces or prevents bleeding episodes in a subject suffering from haemophilia. In another preferred embodiment, treatment with the inhibitor of the invention reduces or prevents bleeding into a joint of a subject suffering from haemophilia. In certain embodiments, treatment with the inhibitor of the invention reduces or prevents bleeding into a muscle or into the brain of a subject suffering from haemophilia.

[0156] Alternatively or in addition, treatment of a subject, preferably a subject having a disorder of haemostasis, such as haemophilia, with the inhibitor of the invention may result in one or more of more of the following: In certain embodiments, treatment of a subject, preferably a subject having a disorder of haemostasis, such as haemophilia, with the inhibitor of the invention results in reduced bone marrow hyperplasia. As shown in FIG. 12A, treatment of Haem A mice with an inhibitor of the invention significantly reduced bone marrow hyperplasia in said mice.

[0157] In certain embodiments, treatment of a subject, preferably a subject having a disorder of haemostasis, such as haemophilia, with the inhibitor of the invention results in reduced osteoarthritis. As shown in FIG. 12B, treatment of Haem A mice with an inhibitor of the invention significantly reduced osteoarthritis in said mice.

[0158] In certain embodiments, treatment of a subject, preferably a subject having a disorder of haemostasis, such as haemophilia, with the inhibitor of the invention results in reduced chondrocyte degeneration/necrosis. As shown in FIG. 12C, treatment of Haem A mice with an inhibitor of the invention significantly reduced chondrocyte degeneration/necrosis in said mice.

[0159] In certain embodiments, treatment of a subject, preferably a subject having a disorder of haemostasis, such as haemophilia, with the inhibitor of the invention results in reduced haemorrhage. As shown in FIG. 12D, treatment of Haem A mice with an inhibitor of the invention significantly reduced haemorrhage in said mice.

[0160] In certain embodiments, treatment of a subject, preferably a subject having a disorder of haemostasis, such as haemophilia, with the inhibitor of the invention results in reduced haemosiderin deposition. As shown in FIG. 12E, treatment of Haem A mice with an inhibitor of the invention significantly reduced haemosiderin deposition in said mice.

[0161] In certain embodiments, treatment of a subject, preferably a subject having a disorder of haemostasis, such as haemophilia, with the inhibitor of the invention results in reduced occurrence of haematoma. As shown in FIG. 12F, treatment of Haem A mice with an inhibitor of the invention significantly reduced haematoma in said mice.

[0162] In certain embodiments, treatment of a subject, preferably a subject having a disorder of haemostasis, such as haemophilia, with the inhibitor of the invention results in reduced osteoclastogenic bone resorption. As shown in FIG. 12G, treatment of Haem A mice with an inhibitor of the invention significantly reduced osteoclastogenic bone resorption in said mice.

[0163] In certain embodiments, treatment of a subject, preferably a subject having a disorder of haemostasis, such as haemophilia, with the inhibitor of the invention results in reduced osteolysis. As shown in FIG. 12H, treatment of Haem A mice with an inhibitor of the invention significantly reduced osteolysis in said mice.

[0164] In certain embodiments, treatment of a subject, preferably a subject having a disorder of haemostasis, such as haemophilia, with the inhibitor of the invention results in reduced periostitis. As shown in FIG. 12I, treatment of Haem A mice with an inhibitor of the invention significantly reduced periostitis in said mice.

[0165] In certain embodiments, treatment of a subject, preferably a subject having a disorder of haemostasis, such as haemophilia, with the inhibitor of the invention results in reduced sub-chondral bone sclerosis. As shown in FIG. 12J, treatment of Haem A mice with an inhibitor of the invention significantly reduced sub-chondral bone sclerosis in said mice.

[0166] In certain embodiments, treatment of a subject, preferably a subject having a disorder of haemostasis, such as haemophilia, with the inhibitor of the invention results in reduced tendon degeneration. As shown in FIG. 12K, treatment of Haem A mice with an inhibitor of the invention significantly reduced tendon degeneration in said mice.

[0167] In certain embodiments, treatment of a subject, preferably a subject having a disorder of haemostasis, such as haemophilia, with the inhibitor of the invention results in reduced tendonitis. As shown in FIG. 12L, treatment of Haem A mice with an inhibitor of the invention significantly reduced tendonitis in said mice.

[0168] In certain embodiments, treatment of a subject, preferably a subject having a disorder of haemostasis, such as haemophilia, with the inhibitor of the invention results in reduced tenosynovitis. As shown in FIG. 12M, treatment of Haem A mice with an inhibitor of the invention significantly reduced tenosynovitis in said mice.

[0169] Thus, in a particular embodiment, the invention relates to an inhibitor suitable for use, or for use, in treatment of haemophilia, wherein the treatment of haemophilia is characterized by reduced bleeding and one or more of: reduced bone marrow hyperplasia, reduced osteoarthritis, reduced chondrocyte degeneration/necrosis, reduced haemorrhage, reduced haemosiderin deposition, reduced haematoma, reduced osteoclastogenic bone resorption, reduced osteolysis, reduced periostitis, reduced sub-chondral bone sclerosis, reduced tendon degeneration, reduced tendonitis, and/or reduced tenosynovitis.

[0170] The term “treatment”, as used herein, refers to the medical therapy of any human or other vertebrate subject in need thereof. Said subject is expected to have undergone physical examination by a medical practitioner, or a veterinary medical practitioner, who has given a tentative or definitive diagnosis which would indicate that the use of said specific treatment is beneficial to treating a disease in said human or other vertebrate. The timing and purpose of said treatment may vary from one individual to another, according to the subject's health. Thus, said treatment may be prophylactic, palliative, symptomatic and/or curative.

### Inhibitors

[0171] Inhibitors of the invention include nucleic acids such as siRNAs, antibodies and antigen binding fragments thereof, e.g., monoclonal antibodies, polypeptides, antibody-drug conjugates, and small molecules. Preferred are nucleic acids such as siRNA.

[0172] Certain preferred features of inhibitors of the invention, where these are oligonucelosides such as siRNA, are given below.

[0173] In certain embodiments, the nucleic acid comprises a first strand comprising a sequence that is at least partially complementary to a portion of RNA transcribed from the ZPI gene (SEQ ID NO:1). In a preferred embodiment, the nucleic acid comprises a first strand comprising a sequence that is at least partially complementary to a ZPI mRNA (NM_016186.3).

[0174] In certain embodiments, the nucleic acid for inhibiting expression of ZPI comprises a duplex region that comprises a first strand and a second strand that is at least partially complementary to the first strand, wherein said first strand is:
[0175] (i) at least partially complementary to a portion of RNA transcribed from the ZPI gene, and
[0176] (ii) comprises at least 17 contiguous nucleosides differing by 0 or 1 nucleosides from any one of SEQ ID NO:122-241.

[0177] In certain embodiments, the first strand comprises nucleosides 2-18 of any one of the sequences set forth in SEQ ID NO:122-241.

[0178] In certain embodiments, the first strand comprises any one of SEQ ID NO:122-241.

[0179] In certain embodiments, the nucleic acid for inhibiting expression of ZPI comprises a duplex region that comprises a first strand and a second strand that is at least partially complementary to the first strand, wherein said first strand is:
[0180] (i) at least partially complementary to a portion of RNA transcribed from the ZPI gene, and
[0181] (ii) comprises at least 21 contiguous nucleosides differing by 0 or 1 nucleosides from any one of SEQ ID NO:122-241.

[0182] In certain embodiments, the first strand comprises nucleosides 2-22 of any one of the sequences set forth in SEQ ID NO:122-241.

[0183] In certain embodiments, the second strand comprises a nucleoside sequence of at least 17 contiguous nucleosides differing by 0 or 1 nucleosides from any one of SEQ ID NO:242-361; wherein the second strand has a region of at least 85% complementarity over the 17 contiguous nucleosides to the first strand.

[0184] In certain embodiments, the second strand comprises a nucleoside sequence of at least 19 contiguous nucleosides differing by 0 or 1 nucleosides from any one of SEQ ID NO:242-361; wherein the second strand has a region of at least 85% complementarity over the 19 contiguous nucleosides to the first strand.

[0185] In certain embodiments, the second strand comprises a nucleoside sequence of at least 21 contiguous nucleosides differing by 0 or 1 nucleosides from any one of SEQ ID NO:242-361; wherein the second strand has a region of at least 85% complementarity over the 21 contiguous nucleosides to the first strand.

[0186] In certain embodiments, the second strand comprises any one of SEQ ID NO:242-361.

[0187] In certain embodiments, the nucleic acid comprises a first strand that comprises, consists of, or consists essentially of a nucleoside sequence differing by 0 or 1 nucleosides from any one of SEQ ID NO:122-241;
[0188] and a second strand that comprises, consists of, or consists essentially of a nucleoside sequence differing by 0 or 1 nucleosides from any one of SEQ ID NO:242-361.

[0189] It is preferred herein that the duplex region is formed between a first (antisense) strand and a complementary second (sense) strand. Exemplary pairs of complementary antisense and sense strands are listed in Table 2 below: Table 2:

TABLE 2

| | First (Antisense) Strand | | Second (Sense) Strand | |
|---|---|---|---|---|
| | Base Sequence 5′→3′ | | Base Sequence 5′→3′ | Corresponding |
| SEQ ID | (Shown as an Unmodified | SEQ ID | (Shown as an Unmodified | positions on |
| NO (AS) | Nucleotide Sequence) | NO (SS) | Nucleotide Sequence) | NM_016186.3 |
| SEQ ID | AAAUCCUUGUGGAUGAAGG | SEQ ID | UGCCUUCAUCCACAAGG | 991-1012 |
| NO: 122 | CAAA | NO: 242 | AUUU | |
| SEQ ID | GCCUCAUGGAGAUCUUUCG | SEQ ID | UGCGAAAGAUCUCCAUG | 756-777 |
| NO: 123 | CAGC | NO: 243 | AGGC | |
| SEQ ID | UUCUCCAUGAGGACCACCA | SEQ ID | GCUGGUGGUCCUCAUGG | 1390-1411 |
| NO: 124 | GCAU | NO: 244 | AGAA | |
| SEQ ID | UGCCUCAUGGAGAUCUUUC | SEQ ID | GCGAAAGAUCUCCAUGA | 757-778 |
| NO: 125 | GCAG | NO: 245 | GGCA | |
| SEQ ID | AGCAGCUCAUGCAUCUCAU | SEQ ID | GUAUGAGAUGCAUGAGC | 1531-1552 |
| NO: 126 | ACUU | NO: 246 | UGCU | |
| SEQ ID | UCAGGAUUAAUCUCAUCAA | SEQ ID | GUUUGAUGAGAUUAAUC | 1156-1177 |
| NO: 127 | ACAG | NO: 247 | CUGA | |
| SEQ ID | UUGGUUUCAGGAUUAAUCU | SEQ ID | UGAGAUUAAUCCUGAAA | 1162-1183 |
| NO: 128 | CAUC | NO: 248 | CCAA | |
| SEQ ID | GUUUCAGGAUUAAUCUCAU | SEQ ID | UGAUGAGAUUAAUCCUG | 1159-1180 |
| NO: 129 | CAAA | NO: 249 | AAAC | |
| SEQ ID | UGGUUUCAGGAUUAAUCUC | SEQ ID | AUGAGAUUAAUCCUGAA | 1161-1182 |
| NO: 130 | AUCA | NO: 250 | ACCA | |
| SEQ ID | GGUUUCAGGAUUAAUCUCA | SEQ ID | GAUGAGAUUAAUCCUGA | 1160-1181 |
| NO: 131 | UCAA | NO: 251 | AACC | |
| SEQ ID | AGGAUUAAUCUCAUCAAAC | SEQ ID | CUGUUUGAUGAGAUUAA | 1154-1175 |
| NO: 132 | AGUU | NO: 252 | UCCU | |
| SEQ ID | UCCUUGUGGAUGAAGGCAA | SEQ ID | UUUUGCCUUCAUCCACA | 988-1009 |
| NO: 133 | AACU | NO: 253 | AGGA | |
| SEQ ID | GUGCCUCAUGGAGAUCUUU | SEQ ID | CGAAAGAUCUCCAUGAG | 758-779 |
| NO: 134 | CGCA | NO: 254 | GCAC | |
| SEQ ID | UCUCCAUGAGGACCACCAG | SEQ ID | UGCUGGUGGUCCUCAUG | 1389-1410 |
| NO: 135 | CAUG | NO: 255 | GAGA | |
| SEQ ID | CAAAAUCCUUGUGGAUGAA | SEQ ID | CCUUCAUCCACAAGGAU | 993-1014 |
| NO: 136 | GGCA | NO: 256 | UUUG | |
| SEQ ID | CGUGCCUCAUGGAGAUCUU | SEQ ID | GAAAGAUCUCCAUGAGG | 759-780 |
| NO: 137 | UCGC | NO: 257 | CACG | |
| SEQ ID | AUCAAAAUCCUUGUGGAUG | SEQ ID | UUCAUCCACAAGGAUUU | 995-1016 |
| NO: 138 | AAGG | NO: 258 | UGAU | |
| SEQ ID | UUCAGGAUUAAUCUCAUCA | SEQ ID | UUUGAUGAGAUUAAUCC | 1157-1178 |
| NO: 139 | AACA | NO: 259 | UGAA | |
| SEQ ID | AAUCCUUGUGGAUGAAGGC | SEQ ID | UUGCCUUCAUCCACAAG | 990-1011 |
| NO: 140 | AAAA | NO: 260 | GAUU | |
| SEQ ID | CCAUCGUGCCUCAUGGAGA | SEQ ID | GAUCUCCAUGAGGCACG | 763-784 |
| NO: 141 | UCUU | NO: 261 | AUGG | |
| SEQ ID | UCCAUGAGGACCACCAGCA | SEQ ID | CAUGCUGGUGGUCCUCA | 1387-1408 |
| NO: 142 | UGGU | NO: 262 | UGGA | |
| SEQ ID | AUCCUUGUGGAUGAAGGCA | SEQ ID | UUUGCCUUCAUCCACAA | 989-1010 |
| NO: 143 | AAAC | NO: 263 | GGAU | |
| SEQ ID | AAAAUCCUUGUGGAUGAAG | SEQ ID | GCCUUCAUCCACAAGGA | 992-1013 |
| NO: 144 | GCAA | NO: 264 | UUUU | |
| SEQ ID | CAUGGUGGCAUUUCCUUGG | SEQ ID | UACCAAGGAAAUGCCAC | 1370-1391 |
| NO: 145 | UAGG | NO: 265 | CAUG | |
| SEQ ID | UUUCAGGAUUAAUCUCAUC | SEQ ID | UUGAUGAGAUUAAUCCU | 1158-1179 |
| NO: 146 | AAAC | NO: 266 | GAAA | |
| SEQ ID | UCAAAAUCCUUGUGGAUGA | SEQ ID | CUUCAUCCACAAGGAUU | 994-1015 |
| NO: 147 | AGGC | NO: 267 | UUGA | |
| SEQ ID | UCGUGCCUCAUGGAGAUCU | SEQ ID | AAAGAUCUCCAUGAGGC | 760-781 |
| NO: 148 | UUCG | NO: 268 | ACGA | |
| SEQ ID | CAGGAUUAAUCUCAUCAAA | SEQ ID | UGUUUGAUGAGAUUAAU | 1155-1176 |
| NO: 149 | CAGU | NO: 269 | CCUG | |
| SEQ ID | CUCCAUGAGGACCACCAGC | SEQ ID | AUGCUGGUGGUCCUCAU | 1388-1409 |
| NO: 150 | AUGG | NO: 270 | GGAG | |
| SEQ ID | CCUUGUGGAUGAAGGCAAA | SEQ ID | GUUUUGCCUUCAUCCAC | 987-1008 |
| NO: 151 | ACUC | NO: 271 | AAGG | |
| SEQ ID | UGAGGACCACCAGCAUGGU | SEQ ID | CCACCAUGCUGGUGGUC | 1383-1404 |
| NO: 152 | GGCA | NO: 272 | CUCA | |
| SEQ ID | AUGAGGACCACCAGCAUGG | SEQ ID | CACCAUGCUGGUGGUCC | 1384-1405 |
| NO: 153 | UGGC | NO: 273 | UCAU | |
| SEQ ID | AUCGUGCCUCAUGGAGAUC | SEQ ID | AAGAUCUCCAUGAGGCA | 761-782 |
| NO: 154 | UUUC | NO: 274 | CGAU | |
| SEQ ID | CUUGUGGAUGAAGGCAAAA | SEQ ID | AGUUUUGCCUUCAUCCA | 986-1007 |
| NO: 155 | CUCC | NO: 275 | CAAG | |
| SEQ ID | CAUGAGGACCACCAGCAUG | SEQ ID | ACCAUGCUGGUGGUCCU | 1385-1406 |
| NO: 156 | GUGG | NO: 276 | CAUG | |
| SEQ ID | CAUCGUGCCUCAUGGAGAU | SEQ ID | AGAUCUCCAUGAGGCAC | 762-783 |
| NO: 157 | CUUU | NO: 277 | GAUG | |
| SEQ ID | CCAUGAGGACCACCAGCAU | SEQ ID | CCAUGCUGGUGGUCCUC | 1386-1407 |
| NO: 158 | GGUG | NO: 278 | AUGG | |
| SEQ ID | UUCUUGUCAAAGGUGGAGG | SEQ ID | UGCCUCCACCUUUGACA | 1321-1342 |
| NO: 159 | CAAA | NO: 279 | AGAA | |
| SEQ ID | AAUUCUUGUCAAAGGUGGA | SEQ ID | CCUCCACCUUUGACAAG | 1323-1344 |
| NO: 160 | GGCA | NO: 280 | AAUU | |
| SEQ ID | UACAUCAUGGGCACCUUAA | SEQ ID | CAUUAAGGUGCCCAUGA | 1285-1306 |
| NO: 161 | UGGU | NO: 281 | UGUA | |
| SEQ ID | GGCAUUUCCUUGGUAGGGC | SEQ ID | CUGCCCUACCAAGGAAA | 1364-1385 |
| NO: 162 | AGUU | NO: 282 | UGCC | |
| SEQ ID | UUUCCUUGGUAGGGCAGUU | SEQ ID | CAAACUGCCCUACCAAG | 1360-1381 |
| NO: 163 | UGAG | NO: 283 | GAAA | |
| SEQ ID | UUCCUUGGUAGGGCAGUUU | SEQ ID | UCAAACUGCCCUACCAA | 1359-1380 |
| NO: 164 | GAGG | NO: 284 | GGAA | |
| SEQ ID | AAAUUCUUGUCAAAGGUGG | SEQ ID | CUCCACCUUUGACAAGA | 1324-1345 |
| NO: 165 | AGGC | NO: 285 | AUUU | |
| SEQ ID | UUGUCCAGGUGGAAAGUGU | SEQ ID | CGACACUUUCCACCUGG | 1255-1276 |
| NO: 166 | CGAC | NO: 286 | ACAA | |
| SEQ ID | GUACUUGUCCAGGUGGAAA | SEQ ID | ACUUUCCACCUGGACAA | 1259-1280 |
| NO: 167 | GUGU | NO: 287 | GUAC | |
| SEQ ID | AUUUCCUUGGUAGGGCAGU | SEQ ID | AAACUGCCCUACCAAGG | 1361-1382 |
| NO: 168 | UUGA | NO: 288 | AAAU | |
| SEQ ID | GCAUUUCCUUGGUAGGGCA | SEQ ID | ACUGCCCUACCAAGGAA | 1363-1384 |
| NO: 169 | GUUU | NO: 289 | AUGC | |
| SEQ ID | UACUUGUCCAGGUGGAAAG | SEQ ID | CACUUUCCACCUGGACA | 1258-1279 |
| NO: 170 | UGUC | NO: 290 | AGUA | |
| SEQ ID | ACAUCAUGGGCACCUUAAU | SEQ ID | CCAUUAAGGUGCCCAUG | 1284-1305 |
| NO: 171 | GGUC | NO: 291 | AUGU | |
| SEQ ID | UCUUGUCAAAGGUGGAGGC | SEQ ID | UUGCCUCCACCUUUGAC | 1320-1341 |
| NO: 172 | AAAC | NO: 292 | AAGA | |
| SEQ ID | UUGUACUUGUCCAGGUGGA | SEQ ID | UUUCCACCUGGACAAGU | 1261-1282 |
| NO: 173 | AAGU | NO: 293 | ACAA | |
| SEQ ID | CUUGGUAGGGCAGUUUGAG | SEQ ID | UCCUCAAACUGCCCUAC | 1356-1377 |
| NO: 174 | GACA | NO: 294 | CAAG | |
| SEQ ID | CAUUUCCUUGGUAGGGCAG | SEQ ID | AACUGCCCUACCAAGGA | 1362-1383 |
| NO: 175 | UUUG | NO: 295 | AAUG | |
| SEQ ID | CCUUGGUAGGGCAGUUUGA | SEQ ID | CCUCAAACUGCCCUACC | 1357-1378 |
| NO: 176 | GGAC | NO: 296 | AAGG | |
| SEQ ID | UUGGUAGGGCAGUUUGAGG | SEQ ID | GUCCUCAAACUGCCCUA | 1355-1376 |
| NO: 177 | ACAU | NO: 297 | CCAA | |
| SEQ ID | CUUGUCCAGGUGGAAAGUG | SEQ ID | GACACUUUCCACCUGGA | 1256-1277 |
| NO: 178 | UCGA | NO: 298 | CAAG | |
| SEQ ID | CUUGUCAAAGGUGGAGGCA | SEQ ID | UUUGCCUCCACCUUUGA | 1319-1340 |
| NO: 179 | AACU | NO: 299 | CAAG | |
| SEQ ID | ACUUGUCCAGGUGGAAAGU | SEQ ID | ACACUUUCCACCUGGAC | 1257-1278 |
| NO: 180 | GUCG | NO: 300 | AAGU | |
| SEQ ID | CUUGUACUUGUCCAGGUGG | SEQ ID | UUCCACCUGGACAAGUA | 1262-1283 |
| NO: 181 | AAAG | NO: 301 | CAAG | |
| SEQ ID | UGUACUUGUCCAGGUGGAA | SEQ ID | CUUUCCACCUGGACAAG | 1260-1281 |
| NO: 182 | AGUG | NO: 302 | UACA | |
| SEQ ID | UCCUUGGUAGGGCAGUUUG | SEQ ID | CUCAAACUGCCCUACCA | 1358-1379 |
| NO: 183 | AGGA | NO: 303 | AGGA | |
| SEQ ID | UUCCCUUUGAACAAGAUGU | SEQ ID | UUACAUCUUGUUCAAAG | 1198-1219 |
| NO: 184 | AAUC | NO: 304 | GGAA | |
| SEQ ID | AGGACCACCAGCAUGGUGG | SEQ ID | UGCCACCAUGCUGGUGG | 1381-1402 |
| NO: 185 | CAUU | NO: 305 | UCCU | |
| SEQ ID | UAUCAAAAUACCUCUUGGA | SEQ ID | UAUCCAAGAGGUAUUUU | 1038-1059 |
| NO: 186 | UAAA | NO: 306 | GAUA | |
| SEQ ID | ACCACCAGCAUGGUGGCAU | SEQ ID | AAAUGCCACCAUGCUGG | 1378-1399 |
| NO: 187 | UUCC | NO: 307 | UGGU | |
| SEQ ID | UCCCUUUGAACAAGAUGUA | SEQ ID | AUUACAUCUUGUUCAAA | 1197-1218 |
| NO: 188 | AUCC | NO: 308 | GGGA | |
| SEQ ID | UUGCCAUCGUGCCUCAUGG | SEQ ID | CUCCAUGAGGCACGAUG | 766-787 |
| NO: 189 | AGAU | NO: 309 | GCAA | |
| SEQ ID | UUUGAUGACAGGAGGCAUG | SEQ ID | UCCAUGCCUCCUGUCAU | 1721-1742 |
| NO: 190 | GAAU | NO: 310 | CAAA | |
| SEQ ID | UGAUGACAGGAGGCAUGGA | SEQ ID | AUUCCAUGCCUCCUGUC | 1719-1740 |
| NO: 191 | AUAA | NO: 311 | AUCA | |
| SEQ ID | CAGCAUGGUGGCAUUUCCU | SEQ ID | CAAGGAAAUGCCACCAU | 1373-1394 |
| NO: 192 | UGGU | NO: 312 | GCUG | |
| SEQ ID | UUUUCUCCAUGAGGACCAC | SEQ ID | UGGUGGUCCUCAUGGAG | 1392-1413 |
| NO: 193 | CAGC | NO: 313 | AAAA | |
| SEQ ID | CCAUUUCCCUUUGAACAAG | SEQ ID | AUCUUGUUCAAAGGGAA | 1202-1223 |
| NO: 194 | AUGU | NO: 314 | AUGG | |
| SEQ ID | CCAGCAUGGUGGCAUUUCC | SEQ ID | AAGGAAAUGCCACCAUG | 1374-1395 |
| NO: 195 | UUGG | NO: 315 | CUGG | |
| SEQ ID | AUUCUUGUCAAAGGUGGAG | SEQ ID | GCCUCCACCUUUGACAA | 1322-1343 |
| NO: 196 | GCAA | NO: 316 | GAAU | |
| SEQ ID | UUGUGGAUGAAGGCAAAAC | SEQ ID | GAGUUUUGCCUUCAUCC | 985-1006 |
| NO: 197 | UCCC | NO: 317 | ACAA | |
| SEQ ID | CUCAUGGAGAUCUUUCGCA | SEQ ID | GCUGCGAAAGAUCUCCA | 754-775 |
| NO: 198 | GCAG | NO: 318 | UGAG | |
| SEQ ID | UGUCAAAGGUGGAGGCAAA | SEQ ID | AGUUUGCCUCCACCUUU | 1317-1338 |
| NO: 199 | CUUG | NO: 319 | GACA | |
| SEQ ID | UUGUCAAAGGUGGAGGCAA | SEQ ID | GUUUGCCUCCACCUUUG | 1318-1339 |
| NO: 200 | ACUU | NO: 320 | ACAA | |
| SEQ ID | CAUUUCCCUUUGAACAAGA | SEQ ID | CAUCUUGUUCAAAGGGA | 1201-1222 |
| NO: 201 | UGUA | NO: 321 | AAUG | |
| SEQ ID | UGUGGAUGAAGGCAAAACU | SEQ ID | GGAGUUUUGCCUUCAUC | 984-1005 |
| NO: 202 | CCCC | NO: 322 | CACA | |
| SEQ ID | CCUCAUGGAGAUCUUUCGC | SEQ ID | CUGCGAAAGAUCUCCAU | 755-776 |
| NO: 203 | AGCA | NO: 323 | GAGG | |
| SEQ ID | CUUUGAUGACAGGAGGCAU | SEQ ID | CCAUGCCUCCUGUCAUC | 1722-1743 |
| NO: 204 | GGAA | NO: 324 | AAAG | |
| SEQ ID | UCACCACCCUGCCCAGAAA | SEQ ID | UGUUUCUGGGCAGGGUG | 1794-1815 |
| NO: 205 | CAGA | NO: 325 | GUGA | |
| SEQ ID | UGGAGAUCUUUCGCAGCAG | SEQ ID | GCCUGCUGCGAAAGAUC | 750-771 |
| NO: 206 | GCUG | NO: 326 | UCCA | |
| SEQ ID | GAUUAAUCUCAUCAAACAG | SEQ ID | AACUGUUUGAUGAGAUU | 1152-1173 |
| NO: 207 | UUUG | NO: 327 | AAUC | |
| SEQ ID | CACUUUGAUGACAGGAGGC | SEQ ID | AUGCCUCCUGUCAUCAA | 1724-1745 |
| NO: 208 | AUGG | NO: 328 | AGUG | |
| SEQ ID | GCAGCUCAUGCAUCUCAUA | SEQ ID | AGUAUGAGAUGCAUGAG | 1530-1551 |
| NO: 209 | CUUC | NO: 329 | CUGC | |
| SEQ ID | CAGCUCAUGCAUCUCAUAC | SEQ ID | AAGUAUGAGAUGCAUGA | 1529-1550 |
| NO: 210 | UUCU | NO: 330 | GCUG | |
| SEQ ID | UGGUAGGGCAGUUUGAGGA | SEQ ID | UGUCCUCAAACUGCCCU | 1354-1375 |
| NO: 211 | CAUG | NO: 331 | ACCA | |
| SEQ ID | GGAUUAAUCUCAUCAAACA | SEQ ID | ACUGUUUGAUGAGAUUA | 1153-1174 |
| NO: 212 | GUUU | NO: 332 | AUCC | |
| SEQ ID | AUCAUGGGCACCUUAAUGG | SEQ ID | GACCAUUAAGGUGCCCA | 1282-1303 |
| NO: 213 | UCUU | NO: 333 | UGAU | |
| SEQ ID | CAUCAUGGGCACCUUAAUG | SEQ ID | ACCAUUAAGGUGCCCAU | 1283-1304 |
| NO: 214 | GUCU | NO: 334 | GAUG | |
| SEQ ID | UUCACCACCCUGCCCAGAA | SEQ ID | GUUUCUGGGCAGGGUGG | 1795-1816 |
| NO: 215 | ACAG | NO: 335 | UGAA | |
| SEQ ID | CCACCCUGCCCAGAAACAG | SEQ ID | UUCUGUUUCUGGGCAGG | 1791-1812 |
| NO: 216 | AAGC | NO: 336 | GUGG | |
| SEQ ID | GCUUGAACUUCGGAAAGAA | SEQ ID | UUUUCUUUCCGAAGUUC | 1500-1521 |
| NO: 217 | AACU | NO: 337 | AAGC | |
| SEQ ID | AGCUUGAACUUCGGAAAGA | SEQ ID | UUUCUUUCCGAAGUUCA | 1501-1522 |
| NO: 218 | AAAC | NO: 338 | AGCU | |
| SEQ ID | ACCACCCUGCCCAGAAACA | SEQ ID | UCUGUUUCUGGGCAGGG | 1792-1813 |
| NO: 219 | GAAG | NO: 339 | UGGU | |
| SEQ ID | GGUAGGGCAGUUUGAGGAC | SEQ ID | AUGUCCUCAAACUGCCC | 1353-1374 |
| NO: 220 | AUGA | NO: 340 | UACC | |
| SEQ ID | UGUCCAGGUGGAAAGUGUC | SEQ ID | UCGACACUUUCCACCUG | 1254-1275 |
| NO: 221 | GACU | NO: 341 | GACA | |
| SEQ ID | AAAUCCUUGUGGAUGAAGG | SEQ ID | CCUUCAUCCACAAGGAU | 995-1014 |
| NO: 222 | | NO: 342 | UU | |
| SEQ ID | GCCUCAUGGAGAUCUUUCG | SEQ ID | CGAAAGAUCUCCAUGAG | 760-779 |
| NO: 223 | | NO: 343 | GC | |
| SEQ ID | UUCUCCAUGAGGACCACCA | SEQ ID | UGGUGGUCCUCAUGGAG | 1394-1413 |
| NO: 224 | | NO: 344 | AA | |
| SEQ ID | UGCCUCAUGGAGAUCUUUC | SEQ ID | GAAAGAUCUCCAUGAGG | 761-780 |
| NO: 225 | | NO: 345 | CA | |
| SEQ ID | AGCAGCUCAUGCAUCUCAU | SEQ ID | AUGAGAUGCAUGAGCUG | 1535-1554 |
| NO: 226 | | NO: 346 | CU | |
| SEQ ID | UCAGGAUUAAUCUCAUCAA | SEQ ID | UUGAUGAGAUUAAUCCU | 1160-1179 |
| NO: 227 | | NO: 347 | GA | |
| SEQ ID | UUGGUUUCAGGAUUAAUCU | SEQ ID | AGAUUAAUCCUGAAACC | 1166-1185 |
| NO: 228 | | NO: 348 | AA | |
| SEQ ID | GUUUCAGGAUUAAUCUCAU | SEQ ID | AUGAGAUUAAUCCUGAA | 1163-1182 |
| NO: 229 | | NO: 349 | AC | |
| SEQ ID | UGGUUUCAGGAUUAAUCUC | SEQ ID | GAGAUUAAUCCUGAAAC | 1165-1184 |
| NO: 230 | | NO: 350 | CA | |
| SEQ ID | GGUUUCAGGAUUAAUCUCA | SEQ ID | UGAGAUUAAUCCUGAAA | 1164-1183 |
| NO: 231 | | NO: 351 | CC | |
| SEQ ID | AGGAUUAAUCUCAUCAAAC | SEQ ID | GUUUGAUGAGAUUAAUC | 1158-1177 |
| NO: 232 | | NO: 352 | CU | |
| SEQ ID | UCCUUGUGGAUGAAGGCAA | SEQ ID | UUGCCUUCAUCCACAAG | 992-1011 |
| NO: 233 | | NO: 353 | GA | |
| SEQ ID | GUGCCUCAUGGAGAUCUUU | SEQ ID | AAAGAUCUCCAUGAGGC | 762-781 |
| NO: 234 | | NO: 354 | AC | |
| SEQ ID | UCUCCAUGAGGACCACCAG | SEQ ID | CUGGUGGUCCUCAUGGA | 1393-1412 |
| NO: 235 | | NO: 355 | GA | |
| SEQ ID | CAAAAUCCUUGUGGAUGAA | SEQ ID | UUCAUCCACAAGGAUUU | 997-1016 |
| NO: 236 | | NO: 356 | UG | |
| SEQ ID | CGUGCCUCAUGGAGAUCUU | SEQ ID | AAGAUCUCCAUGAGGCA | 763-782 |
| NO: 237 | | NO: 357 | CG | |
| SEQ ID | AUCAAAAUCCUUGUGGAUG | SEQ ID | CAUCCACAAGGAUUUUG | 999-1018 |
| NO: 238 | | NO: 358 | AU | |
| SEQ ID | UUCAGGAUUAAUCUCAUCA | SEQ ID | UGAUGAGAUUAAUCCUG | 1161-1180 |
| NO: 239 | | NO: 359 | AA | |
| SEQ ID | AAUCCUUGUGGAUGAAGGC | SEQ ID | GCCUUCAUCCACAAGGA | 994-1013 |
| NO: 240 | | NO: 360 | UU | |
| SEQ ID | CCAUCGUGCCUCAUGGAGA | SEQ ID | UCUCCAUGAGGCACGAU | 767-786 |
| NO: 241 | | NO: 361 | GG | |
| SEQ ID | AAAGUCCUUGUGGAUGAAG | SEQ ID | GCCUUCAUCCACAAGGA | NA |
| NO: 787 | GCAA | NO: 791 | CUUU | |
| SEQ ID | AACUUCUUGUCAAAGGUGG | SEQ ID | CUCCACCUUUGACAAGA | NA |
| NO: 788 | AGGC | NO: 792 | AGUU | |
| SEQ ID | UGUGGAUGAAGGCAAAGCU | SEQ ID | GUAGCUUUGCCUUCAUC | NA |
| NO: 789 | ACCC | NO: 793 | CACA | |

[0190] In a particular embodiment, the invention relates to a nucleic acid comprising first and second strands that comprise, consist of, or consist essentially of a nucleoside sequence differing by 0 or 1 nucleosides from any one of the following first and second sequences:

| Unmodified first strand | Unmodified second strand |
|---|---|
| SEQ ID NO: 148 | SEQ ID NO: 268 |
| SEQ ID NO: 145 | SEQ ID NO: 265 |
| SEQ ID NO: 144 | SEQ ID NO: 264 |
| SEQ ID NO: 165 | SEQ ID NO: 285 |
| SEQ ID NO: 202 | SEQ ID NO: 322 |

[0191] In certain embodiments, the nucleic acid for inhibiting expression of ZPI comprises a duplex region that comprises a first strand and a second strand that is at least partially complementary to the first strand, wherein said first strand is:
[0192] (i) at least partially complementary to a portion of RNA transcribed from the ZPI gene, and
[0193] (ii) comprises at least 17 contiguous nucleosides differing by 0 or 1 nucleosides from any one of SEQ ID NO: 362-561, 762-771, 782-786 or 795-797.

[0194] In certain embodiments, the first strand comprises nucleosides 2-18 of any one of the sequences set forth in SEQ TD NO: 362-561, 762-771, 782-786 or 795-797.

[0195] In certain embodiments, the nucleic acid for inhibiting expression of ZPI comprises a duplex region that comprises a first strand and a second strand that is at least partially complementary to the first strand, wherein said first strand is:
[0196] (i) at least partially complementary to a portion of RNA transcribed from the ZPI gene, and
[0197] (ii) comprises at least 21 contiguous nucleosides differing by 0 or 1 nucleosides from any one of SEQ ID NO: 362-561, 762-771, 782-786 or 795-797.

[0198] In certain embodiments, the first strand comprises nucleosides 2-22 ofany one of the sequences set forth in SEQ TD NO: 362-561, 762-771, 782-786 or 795-797.

[0199] In certain embodiments, the first strand comprises any one of SEQ TD NO:362-561, 762-771, 782-786 or 795-797.

[0200] The modification pattern of the nucleic acids as set forth in SEQ TD NO:362-561, 762-771, 782-786 or 795-797 is summarized in Table 3 below:

TABLE 3

| | | | Underlying | |
|---|---|---|---|---|
| | | | Base | |
| | | | Sequence | |
| | | | 5′ → 3′ | |
| Anti- | | SEQ ID | (Shown as an | SEQ ID |
| sense | Modified First | NO | Unmodified | NO |
| strand | (Antisense) Strand | (AS - | Nucleotide | (AS - |
| ID | 5′ → 3′ | mod) | Sequence) | unmod) |
| ETXS632 | AmsAfsAmUmCmCfUmUfGfUmGmGmA | SEQ ID | AAAUCCUUGUGGAU | SEQ ID |
| | mUfGmAfAmGmGmCmAmsAmsAm | NO: 362 | GAAGGCAAA | NO: 122 |
| ETXS634 | GmsCfsCmUmCmAfUmGfGfAmGmAmU | SEQ ID | GCCUCAUGGAGAUC | SEQ ID |
| | mCfUmUfUmCmGmCmAmsGmsCm | NO: 363 | UUUCGCAGC | NO: 123 |
| ETXS636 | UmsUfsCmUmCmCfAmUfGfAmGmGmA | SEQ ID | UUCUCCAUGAGGAC | SEQ ID |
| | mCfCmAfCmCmAmGmCmsAmsUm | NO: 364 | CACCAGCAU | NO: 124 |
| ETXS638 | UmsGfsCmCmUmCfAmUfGfGmAmGmA | SEQ ID | UGCCUCAUGGAGAU | SEQ ID |
| | mUfCmUfUmUmCmGmCmsAmsGm | NO: 365 | CUUUCGCAG | NO: 125 |
| ETXS640 | AmsGfsCmAmGmCfUmCfAfUmGmCmA | SEQ ID | AGCAGCUCAUGCAU | SEQ ID |
| | mUfCmUfCmAmUmAmCmsUmsUm | NO: 366 | CUCAUACUU | NO: 126 |
| ETXS642 | UmsCfsAmGmGmAfUmUfAfAmUmCmU | SEQ ID | UCAGGAUUAAUCUC | SEQ ID |
| | mCfAmUfCmAmAmAmCmsAmsGm | NO: 367 | AUCAAACAG | NO: 127 |
| ETXS644 | UmsUfsGmGmUmUfUmCfAfGmGmAmU | SEQ ID | UUGGUUUCAGGAUU | SEQ ID |
| | mUfAmAfUmCmUmCmAmsUmsCm | NO: 368 | AAUCUCAUC | NO: 128 |
| ETXS646 | GmsUfsUmUmCmAfGmGfAfUmUmAmA | SEQ ID | GUUUCAGGAUUAAU | SEQ ID |
| | mUfCmUfCmAmUmCmAmsAmsAm | NO: 369 | CUCAUCAAA | NO: 129 |
| ETXS648 | UmsGfsGmUmUmUfCmAfGfGmAmUmU | SEQ ID | UGGUUUCAGGAUUA | SEQ ID |
| | mAfAmUfCmUmCmAmUmsCmsAm | NO: 370 | AUCUCAUCA | NO: 130 |
| ETXS650 | GmsGfsUmUmUmCfAmGfGfAmUmUmA | SEQ ID | GGUUUCAGGAUUAA | SEQ ID |
| | mAfUmCfUmCmAmUmCmsAmsAm | NO: 371 | UCUCAUCAA | NO: 131 |
| ETXS652 | AmsGfsGmAmUmUfAmAfUfCmUmCmA | SEQ ID | AGGAUUAAUCUCAU | SEQ ID |
| | mUfCmAfAmAmCmAmGmsUmsUm | NO: 372 | CAAACAGUU | NO: 132 |
| ETXS654 | UmsCfsCmUmUmGfUmGfGfAmUmGmA | SEQ ID | UCCUUGUGGAUGAA | SEQ ID |
| | mAfGmGfCmAmAmAmAmsCmsUm | NO: 373 | GGCAAAACU | NO: 133 |
| ETXS656 | GmsUfsGmCmCmUfCmAfUfGmGmAmG | SEQ ID | GUGCCUCAUGGAGA | SEQ ID |
| | mAfUmCfUmUmUmCmGmsCmsAm | NO: 374 | UCUUUCGCA | NO: 134 |
| ETXS658 | UmsCfsUmCmCmAfUmGfAfGmGmAmC | SEQ ID | UCUCCAUGAGGACC | SEQ ID |
| | mCfAmCfCmAmGmCmAmsUmsGm | NO: 375 | ACCAGCAUG | NO: 135 |
| ETXS660 | CmsAfsAmAmAmUfCmCfUfUmGmUmG | SEQ ID | CAAAAUCCUUGUGG | SEQ ID |
| | mGfAmUfGmAmAmGmGmsCmsAm | NO: 376 | AUGAAGGCA | NO: 136 |
| ETXS662 | CmsGfsUmGmCmCfUmCfAfUmGmGmA | SEQ ID | CGUGCCUCAUGGAG | SEQ ID |
| | mGfAmUfCmUmUmUmCmsGmsCm | NO: 377 | AUCUUUCGC | NO: 137 |
| ETXS664 | AmsUfsCmAmAmAfAmUfCfCmUmUmG | SEQ ID | AUCAAAAUCCUUGU | SEQ ID |
| | mUfGmGfAmUmGmAmAmsGmsGm | NO: 378 | GGAUGAAGG | NO: 138 |
| ETXS666 | UmsUfsCmAmGmGfAmUfUfAmAmUmC | SEQ ID | UUCAGGAUUAAUCU | SEQ ID |
| | mUfCmAfUmCmAmAmAmsCmsAm | NO: 379 | CAUCAAACA | NO: 139 |
| ETXS668 | AmsAfsUmCmCmUfUmGfUfGmGmAmU | SEQ ID | AAUCCUUGUGGAUG | SEQ ID |
| | mGfAmAfGmGmCmAmAmsAmsAm | NO: 380 | AAGGCAAAA | NO: 140 |
| ETXS670 | CmsCfsAmUmCmGfUmGfCfCmUmCmA | SEQ ID | CCAUCGUGCCUCAU | SEQ ID |
| | mUfGmGfAmGmAmUmCmsUmsUm | NO: 381 | GGAGAUCUU | NO: 141 |
| ETXS672 | UmsCfsCmAmUmGfAmGfGfAmCmCmA | SEQ ID | UCCAUGAGGACCAC | SEQ ID |
| | mCfCmAfGmCmAmUmGmsGmsUm | NO: 382 | CAGCAUGGU | NO: 142 |
| ETXS674 | AmsUfsCmCmUmUfGmUfGfGmAmUmG | SEQ ID | AUCCUUGUGGAUGA | SEQ ID |
| | mAfAmGfGmCmAmAmAmsAmsCm | NO: 383 | AGGCAAAAC | NO: 143 |
| ETXS676 | AmsAfsAmAmUmCfCmUfUfGmUmGmG | SEQ ID | AAAAUCCUUGUGGA | SEQ ID |
| | mAfUmGfAmAmGmGmCmsAmsAm | NO: 384 | UGAAGGCAA | NO: 144 |
| ETXS678 | CmsAfsUmGmGmUfGmGfCfAmUmUmU | SEQ ID | CAUGGUGGCAUUUC | SEQ ID |
| | mCfCmUfUmGmGmUmAmsGmsGm | NO: 385 | CUUGGUAGG | NO: 145 |
| ETXS680 | UmsUfsUmCmAmGfGmAfUfUmAmAmU | SEQ ID | UUUCAGGAUUAAUC | SEQ ID |
| | mCfUmCfAmUmCmAmAmsAmsCm | NO: 386 | UCAUCAAAC | NO: 146 |
| ETXS682 | UmsCfsAmAmAmAfUmCfCfUmUmGmU | SEQ ID | UCAAAAUCCUUGUG | SEQ ID |
| | mGfGmAfUmGmAmAmGmsGmsCm | NO: 387 | GAUGAAGGC | NO: 147 |
| ETXS684 | UmsCfsGmUmGmCfCmUfCfAmUmGmG | SEQ ID | UCGUGCCUCAUGGA | SEQ ID |
| | mAfGmAfUmCmUmUmUmsCmsGm | NO: 388 | GAUCUUUCG | NO: 148 |
| ETXS686 | CmsAfsGmGmAmUfUmAfAfUmCmUmC | SEQ ID | CAGGAUUAAUCUCA | SEQ ID |
| | mAfUmCfAmAmAmCmAmsGmsUm | NO: 389 | UCAAACAGU | NO: 149 |
| ETXS688 | CmsUfsCmCmAmUfGmAfGfGmAmCmC | SEQ ID | CUCCAUGAGGACCA | SEQ ID |
| | mAfCmCfAmGmCmAmUmsGmsGm | NO: 390 | CCAGCAUGG | NO: 150 |
| ETXS690 | CmsCfsUmUmGmUfGmGfAfUmGmAmA | SEQ ID | CCUUGUGGAUGAAG | SEQ ID |
| | mGfGmCfAmAmAmAmCmsUmsCm | NO: 391 | GCAAAACUC | NO: 151 |
| ETXS692 | UmsGfsAmGmGmAfCmCfAfCmCmAmG | SEQ ID | UGAGGACCACCAGC | SEQ ID |
| | mCfAmUfGmGmUmGmGmsCmsAm | NO: 392 | AUGGUGGCA | NO: 152 |
| ETXS694 | AmsUfsGmAmGmGfAmCfCfAmCmCmA | SEQ ID | AUGAGGACCACCAG | SEQ ID |
| | mGfCmAfUmGmGmUmGmsGmsCm | NO: 393 | CAUGGUGGC | NO: 153 |
| ETXS696 | AmsUfsCmGmUmGfCmCfUfCmAmUmG | SEQ ID | AUCGUGCCUCAUGG | SEQ ID |
| | mGfAmGfAmUmCmUmUmsUmsCm | NO: 394 | AGAUCUUUC | NO: 154 |
| ETXS698 | CmsUfsUmGmUmGfGmAfUfGmAmAmG | SEQ ID | CUUGUGGAUGAAGG | SEQ ID |
| | mGfCmAfAmAmAmCmUmsCmsCm | NO: 395 | CAAAACUCC | NO: 155 |
| ETXS700 | CmsAfsUmGmAmGfGmAfCfCmAmCmC | SEQ ID | CAUGAGGACCACCA | SEQ ID |
| | mAfGmCfAmUmGmGmUmsGmsGm | NO: 396 | GCAUGGUGG | NO: 156 |
| ETXS702 | CmsAfsUmCmGmUfGmCfCfUmCmAmU | SEQ ID | CAUCGUGCCUCAUG | SEQ ID |
| | mGfGmAfGmAmUmCmUmsUmsUm | NO: 397 | GAGAUCUUU | NO: 157 |
| ETXS704 | CmsCfsAmUmGmAfGmGfAfCmCmAmC | SEQ ID | CCAUGAGGACCACC | SEQ ID |
| | mCfAmGfCmAmUmGmGmsUmsGm | NO: 398 | AGCAUGGUG | NO: 158 |
| ETXS706 | UmsUfsCmUmUmGfUmCfAfAmAmGmG | SEQ ID | UUCUUGUCAAAGGU | SEQ ID |
| | mUfGmGfAmGmGmCmAmsAmsAm | NO: 399 | GGAGGCAAA | NO: 159 |
| ETXS708 | AmsAfsUmUmCmUfUmGfUfCmAmAmA | SEQ ID | AAUUCUUGUCAAAG | SEQ ID |
| | mGfGmUfGmGmAmGmGmsCmsAm | NO: 400 | GUGGAGGCA | NO: 160 |
| ETXS710 | UmsAfsCmAmUmCfAmUfGfGmGmCmA | SEQ ID | UACAUCAUGGGCAC | SEQ ID |
| | mCfCmUfUmAmAmUmGmsGmsUm | NO: 401 | CUUAAUGGU | NO: 161 |
| ETXS712 | GmsGfsCmAmUmUfUmCfCfUmUmGmG | SEQ ID | GGCAUUUCCUUGGU | SEQ ID |
| | mUfAmGfGmGmCmAmGmsUmsUm | NO: 402 | AGGGCAGUU | NO: 162 |
| ETXS714 | UmsUfsUmCmCmUfUmGfGfUmAmGmG | SEQ ID | UUUCCUUGGUAGGG | SEQ ID |
| | mGfCmAfGmUmUmUmGmsAmsGm | NO: 403 | CAGUUUGAG | NO: 163 |
| ETXS716 | UmsUfsCmCmUmUfGmGfUfAmGmGmG | SEQ ID | UUCCUUGGUAGGGC | SEQ ID |
| | mCfAmGfUmUmUmGmAmsGmsGm | NO: 404 | AGUUUGAGG | NO: 164 |
| ETXS718 | AmsAfsAmUmUmCfUmUfGfUmCmAmA | SEQ ID | AAAUUCUUGUCAAA | SEQ ID |
| | mAfGmGfUmGmGmAmGmsGmsCm | NO: 405 | GGUGGAGGC | NO: 165 |
| ETXS720 | UmsUfsGmUmCmCfAmGfGfUmGmGmA | SEQ ID | UUGUCCAGGUGGAA | SEQ ID |
| | mAfAmGfUmGmUmCmGmsAmsCm | NO: 406 | AGUGUCGAC | NO: 166 |
| ETXS722 | GmsUfsAmCmUmUfGmUfCfCmAmGmG | SEQ ID | GUACUUGUCCAGGU | SEQ ID |
| | mUfGmGfAmAmAmGmUmsGmsUm | NO: 407 | GGAAAGUGU | NO: 167 |
| ETXS724 | AmsUfsUmUmCmCfUmUfGfGmUmAmG | SEQ ID | AUUUCCUUGGUAGG | SEQ ID |
| | mGfGmCfAmGmUmUmUmsGmsAm | NO: 408 | GCAGUUUGA | NO: 168 |
| ETXS726 | GmsCfsAmUmUmUfCmCfUfUmGmGmU | SEQ ID | GCAUUUCCUUGGUA | SEQ ID |
| | mAfGmGfGmCmAmGmUmsUmsUm | NO: 409 | GGGCAGUUU | NO: 169 |
| ETXS728 | UmsAfsCmUmUmGfUmCfCfAmGmGmU | SEQ ID | UACUUGUCCAGGUG | SEQ ID |
| | mGfGmAfAmAmGmUmGmsUmsCm | NO: 410 | GAAAGUGUC | NO: 170 |
| ETXS730 | AmsCfsAmUmCmAfUmGfGfGmCmAmC | SEQ ID | ACAUCAUGGGCACC | SEQ ID |
| | mCfUmUfAmAmUmGmGmsUmsCm | NO: 411 | UUAAUGGUC | NO: 171 |
| ETXS732 | UmsCfsUmUmGmUfCmAfAfAmGmGmU | SEQ ID | UCUUGUCAAAGGUG | SEQ ID |
| | mGfGmAfGmGmCmAmAmsAmsCm | NO: 412 | GAGGCAAAC | NO: 172 |
| ETXS734 | UmsUfsGmUmAmCfUmUfGfUmCmCmA | SEQ ID | UUGUACUUGUCCAG | SEQ ID |
| | mGfGmUfGmGmAmAmAmsGmsUm | NO: 413 | GUGGAAAGU | NO: 173 |
| ETXS736 | CmsUfsUmGmGmUfAmGfGfGmCmAmG | SEQ ID | CUUGGUAGGGCAGU | SEQ ID |
| | mUfUmUfGmAmGmGmAmsCmsAm | NO: 414 | UUGAGGACA | NO: 174 |
| ETXS738 | CmsAfsUmUmUmCfCmUfUfGmGmUmA | SEQ ID | CAUUUCCUUGGUAG | SEQ ID |
| | mGfGmGfCmAmGmUmUmsUmsGm | NO: 415 | GGCAGUUUG | NO: 175 |
| ETXS740 | CmsCfsUmUmGmGfUmAfGfGmGmCmA | SEQ ID | CCUUGGUAGGGCAG | SEQ ID |
| | mGfUmUfUmGmAmGmGmsAmsCm | NO: 416 | UUUGAGGAC | NO: 176 |
| ETXS742 | UmsUfsGmGmUmAfGmGfGfCmAmGmU | SEQ ID | UUGGUAGGGCAGUU | SEQ ID |
| | mUfUmGfAmGmGmAmCmsAmsUm | NO: 417 | UGAGGACAU | NO: 177 |
| ETXS744 | CmsUfsUmGmUmCfCmAfGfGmUmGmG | SEQ ID | CUUGUCCAGGUGGA | SEQ ID |
| | mAfAmAfGmUmGmUmCmsGmsAm | NO: 418 | AAGUGUCGA | NO: 178 |
| ETXS746 | CmsUfsUmGmUmCfAmAfAfGmGmUmG | SEQ ID | CUUGUCAAAGGUGG | SEQ ID |
| | mGfAmGfGmCmAmAmAmsCmsUm | NO: 419 | AGGCAAACU | NO: 179 |
| ETXS748 | AmsCfsUmUmGmUfCmCfAfGmGmUmG | SEQ ID | ACUUGUCCAGGUGG | SEQ ID |
| | mGfAmAfAmGmUmGmUmsCmsGm | NO: 420 | AAAGUGUCG | NO: 180 |
| ETXS750 | CmsUfsUmGmUmAfCmUfUfGmUmCmC | SEQ ID | CUUGUACUUGUCCA | SEQ ID |
| | mAfGmGfUmGmGmAmAmsAmsGm | NO: 421 | GGUGGAAAG | NO: 181 |
| ETXS752 | UmsGfsUmAmCmUfUmGfUfCmCmAmG | SEQ ID | UGUACUUGUCCAGG | SEQ ID |
| | mGfUmGfGmAmAmAmGmsUmsGm | NO: 422 | UGGAAAGUG | NO: 182 |
| ETXS754 | UmsCfsCmUmUmGfGmUfAfGmGmGmC | SEQ ID | UCCUUGGUAGGGCA | SEQ ID |
| | mAfGmUfUmUmGmAmGmsGmsAm | NO: 423 | GUUUGAGGA | NO: 183 |
| ETXS756 | UmsUfsCmCmCmUfUmUfGfAmAmCmA | SEQ ID | UUCCCUUUGAACAA | SEQ ID |
| | mAfGmAfUmGmUmAmAmsUmsCm | NO: 424 | GAUGUAAUC | NO: 184 |
| ETXS758 | AmsGfsGmAmCmCfAmCfCfAmGmCmA | SEQ ID | AGGACCACCAGCAU | SEQ ID |
| | mUfGmGfUmGmGmCmAmsUmsUm | NO: 425 | GGUGGCAUU | NO: 185 |
| ETXS760 | UmsAfsUmCmAmAfAmAfUfAmCmCmU | SEQ ID | UAUCAAAAUACCUC | SEQ ID |
| | mCfUmUfGmGmAmUmAmsAmsAm | NO: 426 | UUGGAUAAA | NO: 186 |
| ETXS762 | AmsCfsCmAmCmCfAmGfCfAmUmGmG | SEQ ID | ACCACCAGCAUGGU | SEQ ID |
| | mUfGmGfCmAmUmUmUmsCmsCm | NO: 427 | GGCAUUUCC | NO: 187 |
| ETXS764 | UmsCfsCmCmUmUfUmGfAfAmCmAmA | SEQ ID | UCCCUUUGAACAAG | SEQ ID |
| | mGfAmUfGmUmAmAmUmsCmsCm | NO: 428 | AUGUAAUCC | NO: 188 |
| ETXS766 | UmsUfsGmCmCmAfUmCfGfUmGmCmC | SEQ ID | UUGCCAUCGUGCCU | SEQ ID |
| | mUfCmAfUmGmGmAmGmsAmsUm | NO: 429 | CAUGGAGAU | NO: 189 |
| ETXS768 | UmsUfsUmGmAmUfGmAfCfAmGmGmA | SEQ ID | UUUGAUGACAGGAG | SEQ ID |
| | mGfGmCfAmUmGmGmAmsAmsUm | NO: 430 | GCAUGGAAU | NO: 190 |
| ETXS770 | UmsGfsAmUmGmAfCmAfGfGmAmGmG | SEQ ID | UGAUGACAGGAGGC | SEQ ID |
| | mCfAmUfGmGmAmAmUmsAmsAm | NO: 431 | AUGGAAUAA | NO: 191 |
| ETXS772 | CmsAfsGmCmAmUfGmGfUfGmGmCmA | SEQ ID | CAGCAUGGUGGCAU | SEQ ID |
| | mUfUmUfCmCmUmUmGmsGmsUm | NO: 432 | UUCCUUGGU | NO: 192 |
| ETXS774 | UmsUfsUmUmCmUfCmCfAfUmGmAmG | SEQ ID | UUUUCUCCAUGAGG | SEQ ID |
| | mGfAmCfCmAmCmCmAmsGmsCm | NO: 433 | ACCACCAGC | NO: 193 |
| ETXS776 | CmsCfsAmUmUmUfCmCfCfUmUmUmG | SEQ ID | CCAUUUCCCUUUGA | SEQ ID |
| | mAfAmCfAmAmGmAmUmsGmsUm | NO: 434 | ACAAGAUGU | NO: 194 |
| ETXS778 | CmsCfsAmGmCmAfUmGfGfUmGmGmC | SEQ ID | CCAGCAUGGUGGCA | SEQ ID |
| | mAfUmUfUmCmCmUmUmsGmsGm | NO: 435 | UUUCCUUGG | NO: 195 |
| ETXS780 | AmsUfsUmCmUmUfGmUfCfAmAmAmG | SEQ ID | AUUCUUGUCAAAGG | SEQ ID |
| | mGfUmGfGmAmGmGmCmsAmsAm | NO: 436 | UGGAGGCAA | NO: 196 |
| ETXS782 | UmsUfsGmUmGmGfAmUfGfAmAmGmG | SEQ ID | UUGUGGAUGAAGGC | SEQ ID |
| | mCfAmAfAmAmCmUmCmsCmsCm | NO: 437 | AAAACUCCC | NO: 197 |
| ETXS784 | CmsUfsCmAmUmGfGmAfGfAmUmCmU | SEQ ID | CUCAUGGAGAUCUU | SEQ ID |
| | mUfUmCfGmCmAmGmCmsAmsGm | NO: 438 | UCGCAGCAG | NO: 198 |
| ETXS786 | UmsGfsUmCmAmAfAmGfGfUmGmGmA | SEQ ID | UGUCAAAGGUGGAG | SEQ ID |
| | mGfGmCfAmAmAmCmUmsUmsGm | NO: 439 | GCAAACUUG | NO: 199 |
| ETXS788 | UmsUfsGmUmCmAfAmAfGfGmUmGmG | SEQ ID | UUGUCAAAGGUGGA | SEQ ID |
| | mAfGmGfCmAmAmAmCmsUmsUm | NO: 440 | GGCAAACUU | NO: 200 |
| ETXS790 | CmsAfsUmUmUmCfCmCfUfUmUmGmA | SEQ ID | CAUUUCCCUUUGAA | SEQ ID |
| | mAfCmAfAmGmAmUmGmsUmsAm | NO: 441 | CAAGAUGUA | NO: 201 |
| ETXS792 | UmsGfsUmGmGmAfUmGfAfAmGmGmC | SEQ ID | UGUGGAUGAAGGCA | SEQ ID |
| | mAfAmAfAmCmUmCmCmsCmsCm | NO: 442 | AAACUCCCC | NO: 202 |
| ETXS794 | CmsCfsUmCmAmUfGmGfAfGmAmUmC | SEQ ID | CCUCAUGGAGAUCU | SEQ ID |
| | mUfUmUfCmGmCmAmGmsCmsAm | NO: 443 | UUCGCAGCA | NO: 203 |
| ETXS796 | CmsUfsUmUmGmAfUmGfAfCmAmGmG | SEQ ID | CUUUGAUGACAGGA | SEQ ID |
| | mAfGmGfCmAmUmGmGmsAmsAm | NO: 444 | GGCAUGGAA | NO: 204 |
| ETXS798 | UmsCfsAmCmCmAfCmCfCfUmGmCmC | SEQ ID | UCACCACCCUGCCC | SEQ ID |
| | mCfAmGfAmAmAmCmAmsGmsAm | NO: 445 | AGAAACAGA | NO: 205 |
| ETXS800 | UmsGfsGmAmGmAfUmCfUfUmUmCmG | SEQ ID | UGGAGAUCUUUCGC | SEQ ID |
| | mCfAmGfCmAmGmGmCmsUmsGm | NO: 446 | AGCAGGCUG | NO: 206 |
| ETXS802 | GmsAfsUmUmAmAfUmCfUfCmAmUmC | SEQ ID | GAUUAAUCUCAUCA | SEQ ID |
| | mAfAmAfCmAmGmUmUmsUmsGm | NO: 447 | AACAGUUUG | NO: 207 |
| ETXS804 | CmsAfsCmUmUmUfGmAfUfGmAmCmA | SEQ ID | CACUUUGAUGACAG | SEQ ID |
| | mGfGmAfGmGmCmAmUmsGmsGm | NO: 448 | GAGGCAUGG | NO: 208 |
| ETXS806 | GmsCfsAmGmCmUfCmAfUfGmCmAmU | SEQ ID | GCAGCUCAUGCAUC | SEQ ID |
| | mCfUmCfAmUmAmCmUmsUmsCm | NO: 449 | UCAUACUUC | NO: 209 |
| ETXS808 | CmsAfsGmCmUmCfAmUfGfCmAmUmC | SEQ ID | CAGCUCAUGCAUCU | SEQ ID |
| | mUfCmAfUmAmCmUmUmsCmsUm | NO: 450 | CAUACUUCU | NO: 210 |
| ETXS810 | UmsGfsGmUmAmGfGmGfCfAmGmUmU | SEQ ID | UGGUAGGGCAGUUU | SEQ ID |
| | mUfGmAfGmGmAmCmAmsUmsGm | NO: 451 | GAGGACAUG | NO: 211 |
| ETXS812 | GmsGfsAmUmUmAfAmUfCfUmCmAmU | SEQ ID | GGAUUAAUCUCAUC | SEQ ID |
| | mCfAmAfAmCmAmGmUmsUmsUm | NO: 452 | AAACAGUUU | NO: 212 |
| ETXS814 | AmsUfsCmAmUmGfGmGfCfAmCmCmU | SEQ ID | AUCAUGGGCACCUU | SEQ ID |
| | mUfAmAfUmGmGmUmCmsUmsUm | NO: 453 | AAUGGUCUU | NO: 213 |
| ETXS816 | CmsAfsUmCmAmUfGmGfGfCmAmCmC | SEQ ID | CAUCAUGGGCACCU | SEQ ID |
| | mUfUmAfAmUmGmGmUmsCmsUm | NO: 454 | UAAUGGUCU | NO: 214 |
| ETXS818 | UmsUfsCmAmCmCfAmCfCfCmUmGmC | SEQ ID | UUCACCACCCUGCC | SEQ ID |
| | mCfCmAfGmAmAmAmCmsAmsGm | NO: 455 | CAGAAACAG | NO: 215 |
| ETXS820 | CmsCfsAmCmCmCfUmGfCfCmCmAmG | SEQ ID | CCACCCUGCCCAGA | SEQ ID |
| | mAfAmAfCmAmGmAmAmsGmsCm | NO: 456 | AACAGAAGC | NO: 216 |
| ETXS822 | GmsCfsUmUmGmAfAmCfUfUmCmGmG | SEQ ID | GCUUGAACUUCGGA | SEQ ID |
| | mAfAmAfGmAmAmAmAmsCmsUm | NO: 457 | AAGAAAACU | NO: 217 |
| ETXS824 | AmsGfsCmUmUmGfAmAfCfUmUmCmG | SEQ ID | AGCUUGAACUUCGG | SEQ ID |
| | mGfAmAfAmGmAmAmAmsAmsCm | NO: 458 | AAAGAAAAC | NO: 218 |
| ETXS826 | AmsCfsCmAmCmCfCmUfGfCmCmCmA | SEQ ID | ACCACCCUGCCCAG | SEQ ID |
| | mGfAmAfAmCmAmGmAmsAmsGm | NO: 459 | AAACAGAAG | NO: 219 |
| ETXS828 | GmsGfsUmAmGmGfGmCfAfGmUmUmU | SEQ ID | GGUAGGGCAGUUUG | SEQ ID |
| | mGfAmGfGmAmCmAmUmsGmsAm | NO: 460 | AGGACAUGA | NO: 220 |
| ETXS830 | UmsGfsUmCmCmAfGmGfUfGmGmAmA | SEQ ID | UGUCCAGGUGGAAA | SEQ ID |
| | mAfGmUfGmUmCmGmAmsCmsUm | NO: 461 | GUGUCGACU | NO: 221 |
| ETXS832 | AmsAfsAmUfCmCfUmUfGmUfGmGfA | SEQ ID | AAAUCCUUGUGGAU | SEQ ID |
| | mUfGmAfAmsGfsGm | NO: 462 | GAAGG | NO: 222 |
| ETXS834 | GmsCfsCmUfCmAfUmGfGmAfGmAfU | SEQ ID | GCCUCAUGGAGAUC | SEQ ID |
| | mCfUmUfUmsCfsGm | NO: 463 | UUUCG | NO: 223 |
| ETXS836 | UmsUfsCmUfCmCfAmUfGmAfGmGfA | SEQ ID | UUCUCCAUGAGGAC | SEQ ID |
| | mCfCmAfCmsCfsAm | NO: 464 | CACCA | NO: 224 |
| ETXS838 | UmsGfsCmCfUmCfAmUfGmGfAmGfA | SEQ ID | UGCCUCAUGGAGAU | SEQ ID |
| | mUfCmUfUmsUfsCm | NO: 465 | CUUUC | NO: 225 |
| ETXS840 | AmsGfsCmAfGmCfUmCfAmUfGmCfA | SEQ ID | AGCAGCUCAUGCAU | SEQ ID |
| | mUfCmUfCmsAfsUm | NO: 466 | CUCAU | NO: 226 |
| ETXS842 | UmsCfsAmGfGmAfUmUfAmAfUmCfU | SEQ ID | UCAGGAUUAAUCUC | SEQ ID |
| | mCfAmUfCmsAfsAm | NO: 467 | AUCAA | NO: 227 |
| ETXS844 | UmsUfsGmGfUmUfUmCfAmGfGmAfU | SEQ ID | UUGGUUUCAGGAUU | SEQ ID |
| | mUfAmAfUmsCfsUm | NO: 468 | AAUCU | NO: 228 |
| ETXS846 | GmsUfsUmUfCmAfGmGfAmUfUmAfA | SEQ ID | GUUUCAGGAUUAAU | SEQ ID |
| | mUfCmUfCmsAfsUm | NO: 469 | CUCAU | NO: 229 |
| ETXS848 | UmsGfsGmUfUmUfCmAfGmGfAmUfU | SEQ ID | UGGUUUCAGGAUUA | SEQ ID |
| | mAfAmUfCmsUfsCm | NO: 470 | AUCUC | NO: 230 |
| ETXS850 | GmsGfsUmUfUmCfAmGfGmAfUmUfA | SEQ ID | GGUUUCAGGAUUAA | SEQ ID |
| | mAfUmCfUmsCfsAm | NO: 471 | UCUCA | NO: 231 |
| ETXS852 | AmsGfsGmAfUmUfAmAfUmCfUmCfA | SEQ ID | AGGAUUAAUCUCAU | SEQ ID |
| | mUfCmAfAmsAfsCm | NO: 472 | CAAAC | NO: 232 |
| ETXS854 | UmsCfsCmUfUmGfUmGfGmAfUmGfA | SEQ ID | UCCUUGUGGAUGAA | SEQ ID |
| | mAfGmGfCmsAfsAm | NO: 473 | GGCAA | NO: 233 |
| ETXS856 | GmsUfsGmCfCmUfCmAfUmGfGmAfG | SEQ ID | GUGCCUCAUGGAGA | SEQ ID |
| | mAfUmCfUmsUfsUm | NO: 474 | UCUUU | NO: 234 |
| ETXS858 | UmsCfsUmCfCmAfUmGfAmGfGmAfC | SEQ ID | UCUCCAUGAGGACC | SEQ ID |
| | mCfAmCfCmsAfsGm | NO: 475 | ACCAG | NO: 235 |
| ETXS860 | CmsAfsAmAfAmUfCmCfUmUfGmUfG | SEQ ID | CAAAAUCCUUGUGG | SEQ ID |
| | mGfAmUfGmsAfsAm | NO: 476 | AUGAA | NO: 236 |
| ETXS862 | CmsGfsUmGfCmCfUmCfAmUfGmGfA | SEQ ID | CGUGCCUCAUGGAG | SEQ ID |
| | mGfAmUfCmsUfsUm | NO: 477 | AUCUU | NO: 237 |
| ETXS864 | AmsUfsCmAfAmAfAmUfCmCfUmUfG | SEQ ID | AUCAAAAUCCUUGU | SEQ ID |
| | mUfGmGfAmsUfsGm | NO: 478 | GGAUG | NO: 238 |
| ETXS866 | UmsUfsCmAfGmGfAmUfUmAfAmUfC | SEQ ID | UUCAGGAUUAAUCU | SEQ ID |
| | mUfCmAfUmsCfsAm | NO: 479 | CAUCA | NO: 239 |
| ETXS868 | AmsAfsUmCfCmUfUmGfUmGfGmAfU | SEQ ID | AAUCCUUGUGGAUG | SEQ ID |
| | mGfAmAfGmsGfsCm | NO: 480 | AAGGC | NO: 240 |
| ETXS870 | CmsCfsAmUfCmGfUmGfCmCfUmCfA | SEQ ID | CCAUCGUGCCUCAU | SEQ ID |
| | mUfGmGfAmsGfsAm | NO: 481 | GGAGA | NO: 241 |
| ETXS872 | AmsAfsAmUfCmCfUmUfGfUmGmGmA | SEQ ID | AAAUCCUUGUGGAU | SEQ ID |
| | mUfGmAfAmGmGmCmAmsAmsAm | NO: 482 | GAAGGCAAA | NO: 122 |
| ETXS874 | GmsCfsCmUfCmAfUmGfGfAmGmAmU | SEQ ID | GCCUCAUGGAGAUC | SEQ ID |
| | mCfUmUfUmCmGmCmAmsGmsCm | NO: 483 | UUUCGCAGC | NO: 123 |
| ETXS876 | UmsUfsCmUfCmCfAmUfGfAmGmGmA | SEQ ID | UUCUCCAUGAGGAC | SEQ ID |
| | mCfCmAfCmCmAmGmCmsAmsUm | NO: 484 | CACCAGCAU | NO: 124 |
| ETXS878 | UmsGfsCmCfUmCfAmUfGfGmAmGmA | SEQ ID | UGCCUCAUGGAGAU | SEQ ID |
| | mUfCmUfUmUmCmGmCmsAmsGm | NO: 485 | CUUUCGCAG | NO: 125 |
| ETXS880 | AmsGfsCmAfGmCfUmCfAfUmGmCmA | SEQ ID | AGCAGCUCAUGCAU | SEQ ID |
| | mUfCmUfCmAmUmAmCmsUmsUm | NO: 486 | CUCAUACUU | NO: 126 |
| ETXS882 | UmsCfsAmGfGmAfUmUfAfAmUmCmU | SEQ ID | UCAGGAUUAAUCUC | SEQ ID |
| | mCfAmUfCmAmAmAmCmsAmsGm | NO: 487 | AUCAAACAG | NO: 127 |
| ETXS884 | UmsUfsGmGfUmUfUmCfAfGmGmAmU | SEQ ID | UUGGUUUCAGGAUU | SEQ ID |
| | mUfAmAfUmCmUmCmAmsUmsCm | NO: 488 | AAUCUCAUC | NO: 128 |
| ETXS886 | GmsUfsUmUfCmAfGmGfAfUmUmAmA | SEQ ID | GUUUCAGGAUUAAU | SEQ ID |
| | mUfCmUfCmAmUmCmAmsAmsAm | NO: 489 | CUCAUCAAA | NO: 129 |
| ETXS888 | UmsGfsGmUfUmUfCmAfGfGmAmUmU | SEQ ID | UGGUUUCAGGAUUA | SEQ ID |
| | mAfAmUfCmUmCmAmUmsCmsAm | NO: 490 | AUCUCAUCA | NO: 130 |
| ETXS890 | GmsGfsUmUfUmCfAmGfGfAmUmUmA | SEQ ID | GGUUUCAGGAUUAA | SEQ ID |
| | mAfUmCfUmCmAmUmCmsAmsAm | NO: 491 | UCUCAUCAA | NO: 131 |
| ETXS892 | AmsGfsGmAfUmUfAmAfUfCmUmCmA | SEQ ID | AGGAUUAAUCUCAU | SEQ ID |
| | mUfCmAfAmAmCmAmGmsUmsUm | NO: 492 | CAAACAGUU | NO: 132 |
| ETXS894 | UmsCfsCmUfUmGfUmGfGfAmUmGmA | SEQ ID | UCCUUGUGGAUGAA | SEQ ID |
| | mAfGmGfCmAmAmAmAmsCmsUm | NO: 493 | GGCAAAACU | NO: 133 |
| ETXS896 | GmsUfsGmCfCmUfCmAfUfGmGmAmG | SEQ ID | GUGCCUCAUGGAGA | SEQ ID |
| | mAfUmCfUmUmUmCmGmsCmsAm | NO: 494 | UCUUUCGCA | NO: 134 |
| ETXS898 | UmsCfsUmCfCmAfUmGfAfGmGmAmC | SEQ ID | UCUCCAUGAGGACC | SEQ ID |
| | mCfAmCfCmAmGmCmAmsUmsGm | NO: 495 | ACCAGCAUG | NO: 135 |
| ETXS900 | CmsAfsAmAfAmUfCmCfUfUmGmUmG | SEQ ID | CAAAAUCCUUGUGG | SEQ ID |
| | mGfAmUfGmAmAmGmGmsCmsAm | NO: 496 | AUGAAGGCA | NO: 136 |
| ETXS902 | CmsGfsUmGfCmCfUmCfAfUmGmGmA | SEQ ID | CGUGCCUCAUGGAG | SEQ ID |
| | mGfAmUfCmUmUmUmCmsGmsCm | NO: 497 | AUCUUUCGC | NO: 137 |
| ETXS904 | AmsUfsCmAfAmAfAmUfCfCmUmUmG | SEQ ID | AUCAAAAUCCUUGU | SEQ ID |
| | mUfGmGfAmUmGmAmAmsGmsGm | NO: 498 | GGAUGAAGG | NO: 138 |
| ETXS906 | UmsUfsCmAfGmGfAmUfUfAmAmUmC | SEQ ID | UUCAGGAUUAAUCU | SEQ ID |
| | mUfCmAfUmCmAmAmAmsCmsAm | NO: 499 | CAUCAAACA | NO: 139 |
| ETXS908 | AmsAfsUmCfCmUfUmGfUfGmGmAmU | SEQ ID | AAUCCUUGUGGAUG | SEQ ID |
| | mGfAmAfGmGmCmAmAmsAmsAm | NO: 500 | AAGGCAAAA | NO: 140 |
| ETXS910 | CmsCfsAmUfCmGfUmGfCfCmUmCmA | SEQ ID | CCAUCGUGCCUCAU | SEQ ID |
| | mUfGmGfAmGmAmUmCmsUmsUm | NO: 501 | GGAGAUCUU | NO: 141 |
| ETXS912 | AmsAfsAmUfCmCfUmUfGfUmGmGmA | SEQ ID | AAAUCCUUGUGGAU | SEQ ID |
| | mUfGmAfAmGmGmCmAmsAmsAm | NO: 502 | GAAGGCAAA | NO: 122 |
| ETXS914 | GmsCfsCmUfCmAfUmGfGfAmGmAmU | SEQ ID | GCCUCAUGGAGAUC | SEQ ID |
| | mCfUmUfUmCmGmCmAmsGmsCm | NO: 503 | UUUCGCAGC | NO: 123 |
| ETXS916 | UmsUfsCmUfCmCfAmUfGfAmGmGmA | SEQ ID | UUCUCCAUGAGGAC | SEQ ID |
| | mCfCmAfCmCmAmGmCmsAmsUm | NO: 504 | CACCAGCAU | NO: 124 |
| ETXS918 | UmsGfsCmCfUmCfAmUfGfGmAmGmA | SEQ ID | UGCCUCAUGGAGAU | SEQ ID |
| | mUfCmUfUmUmCmGmCmsAmsGm | NO: 505 | CUUUCGCAG | NO: 125 |
| ETXS920 | AmsGfsCmAfGmCfUmCfAfUmGmCmA | SEQ ID | AGCAGCUCAUGCAU | SEQ ID |
| | mUfCmUfCmAmUmAmCmsUmsUm | NO: 506 | CUCAUACUU | NO: 126 |
| ETXS922 | UmsCfsAmGfGmAfUmUfAfAmUmCmU | SEQ ID | UCAGGAUUAAUCUC | SEQ ID |
| | mCfAmUfCmAmAmAmCmsAmsGm | NO: 507 | AUCAAACAG | NO: 127 |
| ETXS924 | UmsUfsGmGfUmUfUmCfAfGmGmAmU | SEQ ID | UUGGUUUCAGGAUU | SEQ ID |
| | mUfAmAfUmCmUmCmAmsUmsCm | NO: 508 | AAUCUCAUC | NO: 128 |
| ETXS926 | GmsUfsUmUfCmAfGmGfAfUmUmAmA | SEQ ID | GUUUCAGGAUUAAU | SEQ ID |
| | mUfCmUfCmAmUmCmAmsAmsAm | NO: 509 | CUCAUCAAA | NO: 129 |
| ETXS928 | UmsGfsGmUfUmUfCmAfGfGmAmUmU | SEQ ID | UGGUUUCAGGAUUA | SEQ ID |
| | mAfAmUfCmUmCmAmUmsCmsAm | NO: 510 | AUCUCAUCA | NO: 130 |
| ETXS930 | GmsGfsUmUfUmCfAmGfGfAmUmUmA | SEQ ID | GGUUUCAGGAUUAA | SEQ ID |
| | mAfUmCfUmCmAmUmCmsAmsAm | NO: 511 | UCUCAUCAA | NO: 131 |
| ETXS932 | AmsGfsGmAfUmUfAmAfUfCmUmCmA | SEQ ID | AGGAUUAAUCUCAU | SEQ ID |
| | mUfCmAfAmAmCmAmGmsUmsUm | NO: 512 | CAAACAGUU | NO: 132 |
| ETXS934 | UmsCfsCmUfUmGfUmGfGfAmUmGmA | SEQ ID | UCCUUGUGGAUGAA | SEQ ID |
| | mAfGmGfCmAmAmAmAmsCmsUm | NO: 513 | GGCAAAACU | NO: 133 |
| ETXS936 | GmsUfsGmCfCmUfCmAfUfGmGmAmG | SEQ ID | GUGCCUCAUGGAGA | SEQ ID |
| | mAfUmCfUmUmUmCmGmsCmsAm | NO: 514 | UCUUUCGCA | NO: 134 |
| ETXS938 | UmsCfsUmCfCmAfUmGfAfGmGmAmC | SEQ ID | UCUCCAUGAGGACC | SEQ ID |
| | mCfAmCfCmAmGmCmAmsUmsGm | NO: 515 | ACCAGCAUG | NO: 135 |
| ETXS940 | CmsAfsAmAfAmUfCmCfUfUmGmUmG | SEQ ID | CAAAAUCCUUGUGG | SEQ ID |
| | mGfAmUfGmAmAmGmGmsCmsAm | NO: 516 | AUGAAGGCA | NO: 136 |
| ETXS942 | CmsGfsUmGfCmCfUmCfAfUmGmGmA | SEQ ID | CGUGCCUCAUGGAG | SEQ ID |
| | mGfAmUfCmUmUmUmCmsGmsCm | NO: 517 | AUCUUUCGC | NO: 137 |
| ETXS944 | AmsUfsCmAfAmAfAmUfCfCmUmUmG | SEQ ID | AUCAAAAUCCUUGU | SEQ ID |
| | mUfGmGfAmUmGmAmAmsGmsGm | NO: 518 | GGAUGAAGG | NO: 138 |
| ETXS946 | UmsUfsCmAfGmGfAmUfUfAmAmUmC | SEQ ID | UUCAGGAUUAAUCU | SEQ ID |
| | mUfCmAfUmCmAmAmAmsCmsAm | NO: 519 | CAUCAAACA | NO: 139 |
| ETXS948 | AmsAfsUmCfCmUfUmGfUfGmGmAmU | SEQ ID | AAUCCUUGUGGAUG | SEQ ID |
| | mGfAmAfGmGmCmAmAmsAmsAm | NO: 520 | AAGGCAAAA | NO: 140 |
| ETXS950 | CmsCfsAmUfCmGfUmGfCfCmUmCmA | SEQ ID | CCAUCGUGCCUCAU | SEQ ID |
| | mUfGmGfAmGmAmUmCmsUmsUm | NO: 521 | GGAGAUCUU | NO: 141 |
| ETXS952 | AmsAfsAmUfCmCfUmUfGfUmGmGmA | SEQ ID | AAAUCCUUGUGGAU | SEQ ID |
| | mUfGmAfAmGmGmCmAmsAmsAm | NO: 522 | GAAGGCAAA | NO: 122 |
| ETXS954 | GmsCfsCmUfCmAfUmGfGfAmGmAmU | SEQ ID | GCCUCAUGGAGAUC | SEQ ID |
| | mCfUmUfUmCmGmCmAmsGmsCm | NO: 523 | UUUCGCAGC | NO: 123 |
| ETXS956 | UmsUfsCmUfCmCfAmUfGfAmGmGmA | SEQ ID | UUCUCCAUGAGGAC | SEQ ID |
| | mCfCmAfCmCmAmGmCmsAmsUm | NO: 524 | CACCAGCAU | NO: 124 |
| ETXS958 | UmsGfsCmCfUmCfAmUfGfGmAmGmA | SEQ ID | UGCCUCAUGGAGAU | SEQ ID |
| | mUfCmUfUmUmCmGmCmsAmsGm | NO: 525 | CUUUCGCAG | NO: 125 |
| ETXS960 | AmsGfsCmAfGmCfUmCfAfUmGmCmA | SEQ ID | AGCAGCUCAUGCAU | SEQ ID |
| | mUfCmUfCmAmUmAmCmsUmsUm | NO: 526 | CUCAUACUU | NO: 126 |
| ETXS962 | UmsCfsAmGfGmAfUmUfAfAmUmCmU | SEQ ID | UCAGGAUUAAUCUC | SEQ ID |
| | mCfAmUfCmAmAmAmCmsAmsGm | NO: 527 | AUCAAACAG | NO: 127 |
| ETXS964 | UmsUfsGmGfUmUfUmCfAfGmGmAmU | SEQ ID | UUGGUUUCAGGAUU | SEQ ID |
| | mUfAmAfUmCmUmCmAmsUmsCm | NO: 528 | AAUCUCAUC | NO: 128 |
| ETXS966 | GmsUfsUmUfCmAfGmGfAfUmUmAmA | SEQ ID | GUUUCAGGAUUAAU | SEQ ID |
| | mUfCmUfCmAmUmCmAmsAmsAm | NO: 529 | CUCAUCAAA | NO: 129 |
| ETXS968 | UmsGfsGmUfUmUfCmAfGfGmAmUmU | SEQ ID | UGGUUUCAGGAUUA | SEQ ID |
| | mAfAmUfCmUmCmAmUmsCmsAm | NO: 530 | AUCUCAUCA | NO: 130 |
| ETXS970 | GmsGfsUmUfUmCfAmGfGfAmUmUmA | SEQ ID | GGUUUCAGGAUUAA | SEQ ID |
| | mAfUmCfUmCmAmUmCmsAmsAm | NO: 531 | UCUCAUCAA | NO: 131 |
| ETXS972 | AmsGfsGmAfUmUfAmAfUfCmUmCmA | SEQ ID | AGGAUUAAUCUCAU | SEQ ID |
| | mUfCmAfAmAmCmAmGmsUmsUm | NO: 532 | CAAACAGUU | NO: 132 |
| ETXS974 | UmsCfsCmUfUmGfUmGfGfAmUmGmA | SEQ ID | UCCUUGUGGAUGAA | SEQ ID |
| | mAfGmGfCmAmAmAmAmsCmsUm | NO: 533 | GGCAAAACU | NO: 133 |
| ETXS976 | GmsUfsGmCfCmUfCmAfUfGmGmAmG | SEQ ID | GUGCCUCAUGGAGA | SEQ ID |
| | mAfUmCfUmUmUmCmGmsCmsAm | NO: 534 | UCUUUCGCA | NO: 134 |
| ETXS978 | UmsCfsUmCfCmAfUmGfAfGmGmAmC | SEQ ID | UCUCCAUGAGGACC | SEQ ID |
| | mCfAmCfCmAmGmCmAmsUmsGm | NO: 535 | ACCAGCAUG | NO: 135 |
| ETXS980 | CmsAfsAmAfAmUfCmCfUfUmGmUmG | SEQ ID | CAAAAUCCUUGUGG | SEQ ID |
| | mGfAmUfGmAmAmGmGmsCmsAm | NO: 536 | AUGAAGGCA | NO: 136 |
| ETXS982 | CmsGfsUmGfCmCfUmCfAfUmGmGmA | SEQ ID | CGUGCCUCAUGGAG | SEQ ID |
| | mGfAmUfCmUmUmUmCmsGmsCm | NO: 537 | AUCUUUCGC | NO: 137 |
| ETXS984 | AmsUfsCmAfAmAfAmUfCfCmUmUmG | SEQ ID | AUCAAAAUCCUUGU | SEQ ID |
| | mUfGmGfAmUmGmAmAmsGmsGm | NO: 538 | GGAUGAAGG | NO: 138 |
| ETXS986 | UmsUfsCmAfGmGfAmUfUfAmAmUmC | SEQ ID | UUCAGGAUUAAUCU | SEQ ID |
| | mUfCmAfUmCmAmAmAmsCmsAm | NO: 539 | CAUCAAACA | NO: 139 |
| ETXS988 | AmsAfsUmCfCmUfUmGfUfGmGmAmU | SEQ ID | AAUCCUUGUGGAUG | SEQ ID |
| | mGfAmAfGmGmCmAmAmsAmsAm | NO: 540 | AAGGCAAAA | NO: 140 |
| ETXS990 | CmsCfsAmUfCmGfUmGfCfCmUmCmA | SEQ ID | CCAUCGUGCCUCAU | SEQ ID |
| | mUfGmGfAmGmAmUmCmsUmsUm | NO: 541 | GGAGAUCUU | NO: 141 |
| ETXS992 | AmsAfsAmUfCmCfUmUmGmUmGmGmA | SEQ ID | AAAUCCUUGUGGAU | SEQ ID |
| | mUfGmAfAmGmGmCmAmsAmsAm | NO: 542 | GAAGGCAAA | NO: 122 |
| ETXS994 | GmsCfsCmUfCmAfUmGmGmAmGmAmU | SEQ ID | GCCUCAUGGAGAUC | SEQ ID |
| | mCfUmUfUmCmGmCmAmsGmsCm | NO: 543 | UUUCGCAGC | NO: 123 |
| ETXS996 | UmsUfsCmUfCmCfAmUmGmAmGmGmA | SEQ ID | UUCUCCAUGAGGAC | SEQ ID |
| | mCfCmAfCmCmAmGmCmsAmsUm | NO: 544 | CACCAGCAU | NO: 124 |
| ETXS998 | UmsGfsCmCfUmCfAmUmGmGmAmGmA | SEQ ID | UGCCUCAUGGAGAU | SEQ ID |
| | mUfCmUfUmUmCmGmCmsAmsGm | NO: 545 | CUUUCGCAG | NO: 125 |
| ETXS1000 | AmsGfsCmAfGmCfUmCmAmUmGmCmA | SEQ ID | AGCAGCUCAUGCAU | SEQ ID |
| | mUfCmUfCmAmUmAmCmsUmsUm | NO: 546 | CUCAUACUU | NO: 126 |
| ETXS1002 | UmsCfsAmGfGmAfUmUmAmAmUmCmU | SEQ ID | UCAGGAUUAAUCUC | SEQ ID |
| | mCfAmUfCmAmAmAmCmsAmsGm | NO: 547 | AUCAAACAG | NO: 127 |
| ETXS1004 | UmsUfsGmGfUmUfUmCmAmGmGmAmU | SEQ ID | UUGGUUUCAGGAUU | SEQ ID |
| | mUfAmAfUmCmUmCmAmsUmsCm | NO: 548 | AAUCUCAUC | NO: 128 |
| ETXS1006 | GmsUfsUmUfCmAfGmGmAmUmUmAmA | SEQ ID | GUUUCAGGAUUAAU | SEQ ID |
| | mUfCmUfCmAmUmCmAmsAmsAm | NO: 549 | CUCAUCAAA | NO: 129 |
| ETXS1008 | UmsGfsGmUfUmUfCmAmGmGmAmUmU | SEQ ID | UGGUUUCAGGAUUA | SEQ ID |
| | mAfAmUfCmUmCmAmUmsCmsAm | NO: 550 | AUCUCAUCA | NO: 130 |
| ETXS1010 | GmsGfsUmUfUmCfAmGmGmAmUmUmA | SEQ ID | GGUUUCAGGAUUAA | SEQ ID |
| | mAfUmCfUmCmAmUmCmsAmsAm | NO: 551 | UCUCAUCAA | NO: 131 |
| ETXS1012 | AmsGfsGmAfUmUfAmAmUmCmUmCmA | SEQ ID | AGGAUUAAUCUCAU | SEQ ID |
| | mUfCmAfAmAmCmAmGmsUmsUm | NO: 552 | CAAACAGUU | NO: 132 |
| ETXS1014 | UmsCfsCmUfUmGfUmGmGmAmUmGmA | SEQ ID | UCCUUGUGGAUGAA | SEQ ID |
| | mAfGmGfCmAmAmAmAmsCmsUm | NO: 553 | GGCAAAACU | NO: 133 |
| ETXS1016 | GmsUfsGmCfCmUfCmAmUmGmGmAmG | SEQ ID | GUGCCUCAUGGAGA | SEQ ID |
| | mAfUmCfUmUmUmCmGmsCmsAm | NO: 554 | UCUUUCGCA | NO: 134 |
| ETXS1018 | UmsCfsUmCfCmAfUmGmAmGmGmAmC | SEQ ID | UCUCCAUGAGGACC | SEQ ID |
| | mCfAmCfCmAmGmCmAmsUmsGm | NO: 555 | ACCAGCAUG | NO: 135 |
| ETXS1020 | CmsAfsAmAfAmUfCmCmUmUmGmUmG | SEQ ID | CAAAAUCCUUGUGG | SEQ ID |
| | mGfAmUfGmAmAmGmGmsCmsAm | NO: 556 | AUGAAGGCA | NO: 136 |
| ETXS1022 | CmsGfsUmGfCmCfUmCmAmUmGmGmA | SEQ ID | CGUGCCUCAUGGAG | SEQ ID |
| | mGfAmUfCmUmUmUmCmsGmsCm | NO: 557 | AUCUUUCGC | NO: 137 |
| ETXS1024 | AmsUfsCmAfAmAfAmUmCmCmUmUmG | SEQ ID | AUCAAAAUCCUUGU | SEQ ID |
| | mUfGmGfAmUmGmAmAmsGmsGm | NO: 558 | GGAUGAAGG | NO: 138 |
| ETXS1026 | UmsUfsCmAfGmGfAmUmUmAmAmUmC | SEQ ID | UUCAGGAUUAAUCU | SEQ ID |
| | mUfCmAfUmCmAmAmAmsCmsAm | NO: 559 | CAUCAAACA | NO: 139 |
| ETXS1028 | AmsAfsUmCfCmUfUmGmUmGmGmAmU | SEQ ID | AAUCCUUGUGGAUG | SEQ ID |
| | mGfAmAfGmGmCmAmAmsAmsAm | NO: 560 | AAGGCAAAA | NO: 140 |
| ETXS1030 | CmsCfsAmUfCmGfUmGmCmCmUmCmA | SEQ ID | CCAUCGUGCCUCAU | SEQ ID |
| | mUfGmGfAmGmAmUmCmsUmsUm | NO: 561 | GGAGAUCUU | NO: 141 |
| ETXS1032 | AmsAfsAmAfUmCfCmUmUmGmUmGmG | SEQ ID | AAAAUCCUUGUGGA | SEQ ID |
| | mAfUmGfAmAmGmGmCmsAmsAm | NO: 762 | UGAAGGCAA | NO: 144 |
| ETXS1034 | AmsAfsAmAmUmCfCmUfUmGmUmGmG | SEQ ID | AAAAUCCUUGUGGA | SEQ ID |
| | mAfUmGfAmAmGmGmCmsAmsAm | NO: 763 | UGAAGGCAA | NO: 144 |
| ETXS1036 | CmsAfsUmGfGmUfGmGmCmAmUmUmU | SEQ ID | CAUGGUGGCAUUUC | SEQ ID |
| | mCfCmUfUmGmGmUmAmsGmsGm | NO: 764 | CUUGGUAGG | NO: 145 |
| ETXS1038 | CmsAfsUmGmGmUfGmGfCmAmUmUmU | SEQ ID | CAUGGUGGCAUUUC | SEQ ID |
| | mCfCmUfUmGmGmUmAmsGmsGm | NO: 765 | CUUGGUAGG | NO: 145 |
| ETXS1040 | UmsCfsGmUfGmCfCmUmCmAmUmGmG | SEQ ID | UCGUGCCUCAUGGA | SEQ ID |
| | mAfGmAfUmCmUmUmUmsCmsGm | NO: 766 | GAUCUUUCG | NO: 148 |
| ETXS1042 | UmsCfsGmUmGmCfCmUfCmAmUmGmG | SEQ ID | UCGUGCCUCAUGGA | SEQ ID |
| | mAfGmAfUmCmUmUmUmsCmsGm | NO: 767 | GAUCUUUCG | NO: 148 |
| ETXS1044 | AmsAfsAmUfUmCfUmUmGmUmCmAmA | SEQ ID | AAAUUCUUGUCAAA | SEQ ID |
| | mAfGmGfUmGmGmAmGmsGmsCm | NO: 768 | GGUGGAGGC | NO: 165 |
| ETXS1046 | AmsAfsAmUmUmCfUmUfGmUmCmAmA | SEQ ID | AAAUUCUUGUCAAA | SEQ ID |
| | mAfGmGfUmGmGmAmGmsGmsCm | NO: 769 | GGUGGAGGC | NO: 165 |
| ETXS1048 | UmsGfsUmGfGmAfUmGmAmAmGmGmC | SEQ ID | UGUGGAUGAAGGCA | SEQ ID |
| | mAfAmAfAmCmUmCmCmsCmsCm | NO: 770 | AAACUCCCC | NO: 202 |
| ETXS1050 | UmsGfsUmGmGmAfUmGfAmAmGmGmC | SEQ ID | UGUGGAUGAAGGCA | SEQ ID |
| | mAfAmAfAmCmUmCmCmsCmsCm | NO: 771 | AAACUCCCC | NO: 202 |
| ETXS1051 | AmsAfsAmAmUmCfCmUmUmGmUmGmG | SEQ ID | AAAAUCCUUGUGGA | SEQ ID |
| | mAfUmGfAmAfGmGmCmsAmsAm | NO: 782 | UGAAGGCAA | NO: 144 |
| ETXS1052 | CmsAfsUmGmGmUfGmGmCmAmUmUmU | SEQ ID | CAUGGUGGCAUUUC | SEQ ID |
| | mCfCmUfUmGfGmUmAmsGmsGm | NO: 783 | CUUGGUAGG | NO: 145 |
| ETXS1053 | UmsCfsGmUmGmCfCmUmCmAmUmGmG | SEQ ID | UCGUGCCUCAUGGA | SEQ ID |
| | mAfGmAfUmCfUmUmUmsCmsGm | NO: 784 | GAUCUUUCG | NO: 148 |
| ETXS1054 | AmsAfsAmUmUmCfUmUmGmUmCmAmA | SEQ ID | AAAUUCUUGUCAAA | SEQ ID |
| | mAfGmGfUmGfGmAmGmsGmsCm | NO: 785 | GGUGGAGGC | NO: 165 |
| ETXS1055 | UmsGfsUmGmGmAfUmGmAmAmGmGmC | SEQ ID | UGUGGAUGAAGGCA | SEQ ID |
| | mAfAmAfAmCfUmCmCmsCmsCm | NO: 786 | AAACUCCCC | NO: 202 |
| ETXS2128 | AmsAfsAmGmUmCfCmUfUfGmUmGmG | SEQ ID | AAAGUCCUUGUGGA | SEQ ID |
| | mAfUmGfAmAmGmGmCmsAmsAm | NO: 795 | UGAAGGCAA | NO: 787 |
| ETXS2144 | AmsAfsCmUmUmCfUmUfGfUmCmAmA | SEQ ID | AACUUCUUGUCAAA | SEQ ID |
| | mAfGmGfUmGmGmAmGmsGmsCm | NO: 796 | GGUGGAGGC | NO: 788 |
| ETXS2152 | UmsGfsUmGmGmAfUmGfAfAmGmGmC | SEQ ID | UGUGGAUGAAGGCA | SEQ ID |
| | mAfAmAfGmCmUmAmCmsCmsCm | NO: 797 | AAGCUACCC | NO: 789 |

[0201] In certain embodiments, the second strand comprises a nucleoside sequence of at least 17 contiguous nucleosides differing by 0 or 1 nucleosides from any one of SEQ TD NO:562-761, 772-781 or 798-800; wherein the second strand has a region of at least 8500 complementarity over the 17 contiguous nucleosides to the first strand.

[0202] In certain embodiments, the second strand comprises a nucleoside sequence of at least 19 contiguous nucleosides differing by 0 or 1 nucleosides from any one of SEQ TD NO:562-761, 772-781 or 798-800; wherein the second strand has a region of at least 85% o complementarity over the 19 contiguous nucleosides to the first strand.

[0203] In certain embodiments, the second strand comprises a nucleoside sequence of at least 21 contiguous nucleosides differing by 0 or 1 nucleosides from any one of SEQ TD NO:562-761, 772-781 or 798-800; wherein the second strand has a region of at least 85% o complementarity over the 21 contiguous nucleosides to the first strand.

[0204] In certain embodiments, the second strand comprises any one of SEQ ID NO:562-761, 772-781 or 798-800.

[0205] The modification pattern of the nucleic acids as set forth in SEQ TD NO: 562-761, 772-781 or 798-800 is summarized in Table 4 below:

TABLE 4

| | | | Underlying | |
|---|---|---|---|---|
| | | | Base | |
| | | | Sequence | |
| | | | 5′ → 3′ | |
| | | SEQ ID | (Shown as an | SEQ ID |
| Sense | Modified Second | NO | Unmodified | NO |
| strand | (Sense) Strand | (SS - | Nucleotide | (SS - |
| ID | 5′ → 3′ | mod) | Sequence) | unmod) |
| ETXS631 | UmsGmsCmCmUmUmCfAmUfCfCfAmCmA | SEQ ID | UGCCUUCAUCCACA | SEQ ID |
| | mAmGmGmAmUmUmUm | NO: 562 | AGGAUUU | NO: 242 |
| ETXS633 | UmsGmsCmGmAmAmAfGmAfUfCfUmCmC | SEQ ID | UGCGAAAGAUCUCC | SEQ ID |
| | mAmUmGmAmGmGmCm | NO: 563 | AUGAGGC | NO: 243 |
| ETXS635 | GmsCmsUmGmGmUmGfGmUfCfCfUmCmA | SEQ ID | GCUGGUGGUCCUCA | SEQ ID |
| | mUmGmGmAmGmAmAm | NO: 564 | UGGAGAA | NO: 244 |
| ETXS637 | GmsCmsGmAmAmAmGfAmUfCfUfCmCmA | SEQ ID | GCGAAAGAUCUCCA | SEQ ID |
| | mUmGmAmGmGmCmAm | NO: 565 | UGAGGCA | NO: 245 |
| ETXS639 | GmsUmsAmUmGmAmGfAmUfGfCfAmUmG | SEQ ID | GUAUGAGAUGCAUG | SEQ ID |
| | mAmGmCmUmGmCmUm | NO: 566 | AGCUGCU | NO: 246 |
| ETXS641 | GmsUmsUmUmGmAmUfGmAfGfAfUmUmA | SEQ ID | GUUUGAUGAGAUUA | SEQ ID |
| | mAmUmCmCmUmGmAm | NO: 567 | AUCCUGA | NO: 247 |
| ETXS643 | UmsGmsAmGmAmUmUfAmAfUfCfCmUmG | SEQ ID | UGAGAUUAAUCCUG | SEQ ID |
| | mAmAmAmCmCmAmAm | NO: 568 | AAACCAA | NO: 248 |
| ETXS645 | UmsGmsAmUmGmAmGfAmUfUfAfAmUmC | SEQ ID | UGAUGAGAUUAAUC | SEQ ID |
| | mCmUmGmAmAmAmCm | NO: 569 | CUGAAAC | NO: 249 |
| ETXS647 | AmsUmsGmAmGmAmUfUmAfAfUfCmCmU | SEQ ID | AUGAGAUUAAUCCU | SEQ ID |
| | mGmAmAmAmCmCmAm | NO: 570 | GAAACCA | NO: 250 |
| ETXS649 | GmsAmsUmGmAmGmAfUmUfAfAfUmCmC | SEQ ID | GAUGAGAUUAAUCC | SEQ ID |
| | mUmGmAmAmAmCmCm | NO: 571 | UGAAACC | NO: 251 |
| ETXS651 | CmsUmsGmUmUmUmGfAmUfGfAfGmAmU | SEQ ID | CUGUUUGAUGAGAU | SEQ ID |
| | mUmAmAmUmCmCmUm | NO: 572 | UAAUCCU | NO: 252 |
| ETXS653 | UmsUmsUmUmGmCmCfUmUfCfAfUmCmC | SEQ ID | UUUUGCCUUCAUCC | SEQ ID |
| | mAmCmAmAmGmGmAm | NO: 573 | ACAAGGA | NO: 253 |
| ETXS655 | CmsGmsAmAmAmGmAfUmCfUfCfCmAmU | SEQ ID | CGAAAGAUCUCCAU | SEQ ID |
| | mGmAmGmGmCmAmCm | NO: 574 | GAGGCAC | NO: 254 |
| ETXS657 | UmsGmsCmUmGmGmUfGmGfUfCfCmUmC | SEQ ID | UGCUGGUGGUCCUC | SEQ ID |
| | mAmUmGmGmAmGmAm | NO: 575 | AUGGAGA | NO: 255 |
| ETXS659 | CmsCmsUmUmCmAmUfCmCfAfCfAmAmG | SEQ ID | CCUUCAUCCACAAG | SEQ ID |
| | mGmAmUmUmUmUmGm | NO: 576 | GAUUUUG | NO: 256 |
| ETXS661 | GmsAmsAmAmGmAmUfCmUfCfCfAmUmG | SEQ ID | GAAAGAUCUCCAUG | SEQ ID |
| | mAmGmGmCmAmCmGm | NO: 577 | AGGCACG | NO: 257 |
| ETXS663 | UmsUmsCmAmUmCmCfAmCfAfAfGmGmA | SEQ ID | UUCAUCCACAAGGA | SEQ ID |
| | mUmUmUmUmGmAmUm | NO: 578 | UUUUGAU | NO: 258 |
| ETXS665 | UmsUmsUmGmAmUmGfAmGfAfUfUmAmA | SEQ ID | UUUGAUGAGAUUAA | SEQ ID |
| | mUmCmCmUmGmAmAm | NO: 579 | UCCUGAA | NO: 259 |
| ETXS667 | UmsUmsGmCmCmUmUfCmAfUfCfCmAmC | SEQ ID | UUGCCUUCAUCCAC | SEQ ID |
| | mAmAmGmGmAmUmUm | NO: 580 | AAGGAUU | NO: 260 |
| ETXS669 | GmsAmsUmCmUmCmCfAmUfGfAfGmGmC | SEQ ID | GAUCUCCAUGAGGC | SEQ ID |
| | mAmCmGmAmUmGmGm | NO: 581 | ACGAUGG | NO: 261 |
| ETXS671 | CmsAmsUmGmCmUmGfGmUfGfGfUmCmC | SEQ ID | CAUGCUGGUGGUCC | SEQ ID |
| | mUmCmAmUmGmGmAm | NO: 582 | UCAUGGA | NO: 262 |
| ETXS673 | UmsUmsUmGmCmCmUfUmCfAfUfCmCmA | SEQ ID | UUUGCCUUCAUCCA | SEQ ID |
| | mCmAmAmGmGmAmUm | NO: 583 | CAAGGAU | NO: 263 |
| ETXS675 | GmsCmsCmUmUmCmAfUmCfCfAfCmAmA | SEQ ID | GCCUUCAUCCACAA | SEQ ID |
| | mGmGmAmUmUmUmUm | NO: 584 | GGAUUUU | NO: 264 |
| ETXS677 | UmsAmsCmCmAmAmGfGmAfAfAfUmGmC | SEQ ID | UACCAAGGAAAUGC | SEQ ID |
| | mCmAmCmCmAmUmGm | NO: 585 | CACCAUG | NO: 265 |
| ETXS679 | UmsUmsGmAmUmGmAfGmAfUfUfAmAmU | SEQ ID | UUGAUGAGAUUAAU | SEQ ID |
| | mCmCmUmGmAmAmAm | NO: 586 | CCUGAAA | NO: 266 |
| ETXS681 | CmsUmsUmCmAmUmCfCmAfCfAfAmGmG | SEQ ID | CUUCAUCCACAAGG | SEQ ID |
| | mAmUmUmUmUmGmAm | NO: 587 | AUUUUGA | NO: 267 |
| ETXS683 | AmsAmsAmGmAmUmCfUmCfCfAfUmGmA | SEQ ID | AAAGAUCUCCAUGA | SEQ ID |
| | mGmGmCmAmCmGmAm | NO: 588 | GGCACGA | NO: 268 |
| ETXS685 | UmsGmsUmUmUmGmAfUmGfAfGfAmUmU | SEQ ID | UGUUUGAUGAGAUU | SEQ ID |
| | mAmAmUmCmCmUmGm | NO: 589 | AAUCCUG | NO: 269 |
| ETXS687 | AmsUmsGmCmUmGmGfUmGfGfUfCmCmU | SEQ ID | AUGCUGGUGGUCCU | SEQ ID |
| | mCmAmUmGmGmAmGm | NO: 590 | CAUGGAG | NO: 270 |
| ETXS689 | GmsUmsUmUmUmGmCfCmUfUfCfAmUmC | SEQ ID | GUUUUGCCUUCAUC | SEQ ID |
| | mCmAmCmAmAmGmGm | NO: 591 | CACAAGG | NO: 271 |
| ETXS691 | CmsCmsAmCmCmAmUfGmCfUfGfGmUmG | SEQ ID | CCACCAUGCUGGUG | SEQ ID |
| | mGmUmCmCmUmCmAm | NO: 592 | GUCCUCA | NO: 272 |
| ETXS693 | CmsAmsCmCmAmUmGfCmUfGfGfUmGmG | SEQ ID | CACCAUGCUGGUGG | SEQ ID |
| | mUmCmCmUmCmAmUm | NO: 593 | UCCUCAU | NO: 273 |
| ETXS695 | AmsAmsGmAmUmCmUfCmCfAfUfGmAmG | SEQ ID | AAGAUCUCCAUGAG | SEQ ID |
| | mGmCmAmCmGmAmUm | NO: 594 | GCACGAU | NO: 274 |
| ETXS697 | AmsGmsUmUmUmUmGfCmCfUfUfCmAmU | SEQ ID | AGUUUUGCCUUCAU | SEQ ID |
| | mCmCmAmCmAmAmGm | NO: 595 | CCACAAG | NO: 275 |
| ETXS699 | AmsCmsCmAmUmGmCfUmGfGfUfGmGmU | SEQ ID | ACCAUGCUGGUGGU | SEQ ID |
| | mCmCmUmCmAmUmGm | NO: 596 | CCUCAUG | NO: 276 |
| ETXS701 | AmsGmsAmUmCmUmCfCmAfUfGfAmGmG | SEQ ID | AGAUCUCCAUGAGG | SEQ ID |
| | mCmAmCmGmAmUmGm | NO: 597 | CACGAUG | NO: 277 |
| ETXS703 | CmsCmsAmUmGmCmUfGmGfUfGfGmUmC | SEQ ID | CCAUGCUGGUGGUC | SEQ ID |
| | mCmUmCmAmUmGmGm | NO: 598 | CUCAUGG | NO: 278 |
| ETXS705 | UmsGmsCmCmUmCmCfAmCfCfUfUmUmG | SEQ ID | UGCCUCCACCUUUG | SEQ ID |
| | mAmCmAmAmGmAmAm | NO: 599 | ACAAGAA | NO: 279 |
| ETXS707 | CmsCmsUmCmCmAmCfCmUfUfUfGmAmC | SEQ ID | CCUCCACCUUUGAC | SEQ ID |
| | mAmAmGmAmAmUmUm | NO: 600 | AAGAAUU | NO: 280 |
| ETXS709 | CmsAmsUmUmAmAmGfGmUfGfCfCmCmA | SEQ ID | CAUUAAGGUGCCCA | SEQ ID |
| | mUmGmAmUmGmUmAm | NO: 601 | UGAUGUA | NO: 281 |
| ETXS711 | CmsUmsGmCmCmCmUfAmCfCfAfAmGmG | SEQ ID | CUGCCCUACCAAGG | SEQ ID |
| | mAmAmAmUmGmCmCm | NO: 602 | AAAUGCC | NO: 282 |
| ETXS713 | CmsAmsAmAmCmUmGfCmCfCfUfAmCmC | SEQ ID | CAAACUGCCCUACC | SEQ ID |
| | mAmAmGmGmAmAmAm | NO: 603 | AAGGAAA | NO: 283 |
| ETXS715 | UmsCmsAmAmAmCmUfGmCfCfCfUmAmC | SEQ ID | UCAAACUGCCCUAC | SEQ ID |
| | mCmAmAmGmGmAmAm | NO: 604 | CAAGGAA | NO: 284 |
| ETXS717 | CmsUmsCmCmAmCmCfUmUfUfGfAmCmA | SEQ ID | CUCCACCUUUGACA | SEQ ID |
| | mAmGmAmAmUmUmUm | NO: 605 | AGAAUUU | NO: 285 |
| ETXS719 | CmsGmsAmCmAmCmUfUmUfCfCfAmCmC | SEQ ID | CGACACUUUCCACC | SEQ ID |
| | mUmGmGmAmCmAmAm | NO: 606 | UGGACAA | NO: 286 |
| ETXS721 | AmsCmsUmUmUmCmCfAmCfCfUfGmGmA | SEQ ID | ACUUUCCACCUGGA | SEQ ID |
| | mCmAmAmGmUmAmCm | NO: 607 | CAAGUAC | NO: 287 |
| ETXS723 | AmsAmsAmCmUmGmCfCmCfUfAfCmCmA | SEQ ID | AAACUGCCCUACCA | SEQ ID |
| | mAmGmGmAmAmAmUm | NO: 608 | AGGAAAU | NO: 288 |
| ETXS725 | AmsCmsUmGmCmCmCfUmAfCfCfAmAmG | SEQ ID | ACUGCCCUACCAAG | SEQ ID |
| | mGmAmAmAmUmGmCm | NO: 609 | GAAAUGC | NO: 289 |
| ETXS727 | CmsAmsCmUmUmUmCfCmAfCfCfUmGmG | SEQ ID | CACUUUCCACCUGG | SEQ ID |
| | mAmCmAmAmGmUmAm | NO: 610 | ACAAGUA | NO: 290 |
| ETXS729 | CmsCmsAmUmUmAmAfGmGfUfGfCmCmC | SEQ ID | CCAUUAAGGUGCCC | SEQ ID |
| | mAmUmGmAmUmGmUm | NO: 611 | AUGAUGU | NO: 291 |
| ETXS731 | UmsUmsGmCmCmUmCfCmAfCfCfUmUmU | SEQ ID | UUGCCUCCACCUUU | SEQ ID |
| | mGmAmCmAmAmGmAm | NO: 612 | GACAAGA | NO: 292 |
| ETXS733 | UmsUmsUmCmCmAmCfCmUfGfGfAmCmA | SEQ ID | UUUCCACCUGGACA | SEQ ID |
| | mAmGmUmAmCmAmAm | NO: 613 | AGUACAA | NO: 293 |
| ETXS735 | UmsCmsCmUmCmAmAfAmCfUfGfCmCmC | SEQ ID | UCCUCAAACUGCCC | SEQ ID |
| | mUmAmCmCmAmAmGm | NO: 614 | UACCAAG | NO: 294 |
| ETXS737 | AmsAmsCmUmGmCmCfCmUfAfCfCmAmA | SEQ ID | AACUGCCCUACCAA | SEQ ID |
| | mGmGmAmAmAmUmGm | NO: 615 | GGAAAUG | NO: 295 |
| ETXS739 | CmsCmsUmCmAmAmAfCmUfGfCfCmCmU | SEQ ID | CCUCAAACUGCCCU | SEQ ID |
| | mAmCmCmAmAmGmGm | NO: 616 | ACCAAGG | NO: 296 |
| ETXS741 | GmsUmsCmCmUmCmAfAmAfCfUfGmCmC | SEQ ID | GUCCUCAAACUGCC | SEQ ID |
| | mCmUmAmCmCmAmAm | NO: 617 | CUACCAA | NO: 297 |
| ETXS743 | GmsAmsCmAmCmUmUfUmCfCfAfCmCmU | SEQ ID | GACACUUUCCACCU | SEQ ID |
| | mGmGmAmCmAmAmGm | NO: 618 | GGACAAG | NO: 298 |
| ETXS745 | UmsUmsUmGmCmCmUfCmCfAfCfCmUmU | SEQ ID | UUUGCCUCCACCUU | SEQ ID |
| | mUmGmAmCmAmAmGm | NO: 619 | UGACAAG | NO: 299 |
| ETXS747 | AmsCmsAmCmUmUmUfCmCfAfCfCmUmG | SEQ ID | ACACUUUCCACCUG | SEQ ID |
| | mGmAmCmAmAmGmUm | NO: 620 | GACAAGU | NO: 300 |
| ETXS749 | UmsUmsCmCmAmCmCfUmGfGfAfCmAmA | SEQ ID | UUCCACCUGGACAA | SEQ ID |
| | mGmUmAmCmAmAmGm | NO: 621 | GUACAAG | NO: 301 |
| ETXS751 | CmsUmsUmUmCmCmAfCmCfUfGfGmAmC | SEQ ID | CUUUCCACCUGGAC | SEQ ID |
| | mAmAmGmUmAmCmAm | NO: 622 | AAGUACA | NO: 302 |
| ETXS753 | CmsUmsCmAmAmAmCfUmGfCfCfCmUmA | SEQ ID | CUCAAACUGCCCUA | SEQ ID |
| | mCmCmAmAmGmGmAm | NO: 623 | CCAAGGA | NO: 303 |
| ETXS755 | UmsUmsAmCmAmUmCfUmUfGfUfUmCmA | SEQ ID | UUACAUCUUGUUCA | SEQ ID |
| | mAmAmGmGmGmAmAm | NO: 624 | AAGGGAA | NO: 304 |
| ETXS757 | UmsGmsCmCmAmCmCfAmUfGfCfUmGmG | SEQ ID | UGCCACCAUGCUGG | SEQ ID |
| | mUmGmGmUmCmCmUm | NO: 625 | UGGUCCU | NO: 305 |
| ETXS759 | UmsAmsUmCmCmAmAfGmAfGfGfUmAmU | SEQ ID | UAUCCAAGAGGUAU | SEQ ID |
| | mUmUmUmGmAmUmAm | NO: 626 | UUUGAUA | NO: 306 |
| ETXS761 | AmsAmsAmUmGmCmCfAmCfCfAfUmGmC | SEQ ID | AAAUGCCACCAUGC | SEQ ID |
| | mUmGmGmUmGmGmUm | NO: 627 | UGGUGGU | NO: 307 |
| ETXS763 | AmsUmsUmAmCmAmUfCmUfUfGfUmUmC | SEQ ID | AUUACAUCUUGUUC | SEQ ID |
| | mAmAmAmGmGmGmAm | NO: 628 | AAAGGGA | NO: 308 |
| ETXS765 | CmsUmsCmCmAmUmGfAmGfGfCfAmCmG | SEQ ID | CUCCAUGAGGCACG | SEQ ID |
| | mAmUmGmGmCmAmAm | NO: 629 | AUGGCAA | NO: 309 |
| ETXS767 | UmsCmsCmAmUmGmCfCmUfCfCfUmGmU | SEQ ID | UCCAUGCCUCCUGU | SEQ ID |
| | mCmAmUmCmAmAmAm | NO: 630 | CAUCAAA | NO: 310 |
| ETXS769 | AmsUmsUmCmCmAmUfGmCfCfUfCmCmU | SEQ ID | AUUCCAUGCCUCCU | SEQ ID |
| | mGmUmCmAmUmCmAm | NO: 631 | GUCAUCA | NO: 311 |
| ETXS771 | CmsAmsAmGmGmAmAfAmUfGfCfCmAmC | SEQ ID | CAAGGAAAUGCCAC | SEQ ID |
| | mCmAmUmGmCmUmGm | NO: 632 | CAUGCUG | NO: 312 |
| ETXS773 | UmsGmsGmUmGmGmUfCmCfUfCfAmUmG | SEQ ID | UGGUGGUCCUCAUG | SEQ ID |
| | mGmAmGmAmAmAmAm | NO: 633 | GAGAAAA | NO: 313 |
| ETXS775 | AmsUmsCmUmUmGmUfUmCfAfAfAmGmG | SEQ ID | AUCUUGUUCAAAGG | SEQ ID |
| | mGmAmAmAmUmGmGm | NO: 634 | GAAAUGG | NO: 314 |
| ETXS777 | AmsAmsGmGmAmAmAfUmGfCfCfAmCmC | SEQ ID | AAGGAAAUGCCACC | SEQ ID |
| | mAmUmGmCmUmGmGm | NO: 635 | AUGCUGG | NO: 315 |
| ETXS779 | GmsCmsCmUmCmCmAfCmCfUfUfUmGmA | SEQ ID | GCCUCCACCUUUGA | SEQ ID |
| | mCmAmAmGmAmAmUm | NO: 636 | CAAGAAU | NO: 316 |
| ETXS781 | GmsAmsGmUmUmUmUfGmCfCfUfUmCmA | SEQ ID | GAGUUUUGCCUUCA | SEQ ID |
| | mUmCmCmAmCmAmAm | NO: 637 | UCCACAA | NO: 317 |
| ETXS783 | GmsCmsUmGmCmGmAfAmAfGfAfUmCmU | SEQ ID | GCUGCGAAAGAUCU | SEQ ID |
| | mCmCmAmUmGmAmGm | NO: 638 | CCAUGAG | NO: 318 |
| ETXS785 | AmsGmsUmUmUmGmCfCmUfCfCfAmCmC | SEQ ID | AGUUUGCCUCCACC | SEQ ID |
| | mUmUmUmGmAmCmAm | NO: 639 | UUUGACA | NO: 319 |
| ETXS787 | GmsUmsUmUmGmCmCfUmCfCfAfCmCmU | SEQ ID | GUUUGCCUCCACCU | SEQ ID |
| | mUmUmGmAmCmAmAm | NO: 640 | UUGACAA | NO: 320 |
| ETXS789 | CmsAmsUmCmUmUmGfUmUfCfAfAmAmG | SEQ ID | CAUCUUGUUCAAAG | SEQ ID |
| | mGmGmAmAmAmUmGm | NO: 641 | GGAAAUG | NO: 321 |
| ETXS791 | GmsGmsAmGmUmUmUfUmGfCfCfUmUmC | SEQ ID | GGAGUUUUGCCUUC | SEQ ID |
| | mAmUmCmCmAmCmAm | NO: 642 | AUCCACA | NO: 322 |
| ETXS793 | CmsUmsGmCmGmAmAfAmGfAfUfCmUmC | SEQ ID | CUGCGAAAGAUCUC | SEQ ID |
| | mCmAmUmGmAmGmGm | NO: 643 | CAUGAGG | NO: 323 |
| ETXS795 | CmsCmsAmUmGmCmCfUmCfCfUfGmUmC | SEQ ID | CCAUGCCUCCUGUC | SEQ ID |
| | mAmUmCmAmAmAmGm | NO: 644 | AUCAAAG | NO: 324 |
| ETXS797 | UmsGmsUmUmUmCmUfGmGfGfCfAmGmG | SEQ ID | UGUUUCUGGGCAGG | SEQ ID |
| | mGmUmGmGmUmGmAm | NO: 645 | GUGGUGA | NO: 325 |
| ETXS799 | GmsCmsCmUmGmCmUfGmCfGfAfAmAmG | SEQ ID | GCCUGCUGCGAAAG | SEQ ID |
| | mAmUmCmUmCmCmAm | NO: 646 | AUCUCCA | NO: 326 |
| ETXS801 | AmsAmsCmUmGmUmUfUmGfAfUfGmAmG | SEQ ID | AACUGUUUGAUGAG | SEQ ID |
| | mAmUmUmAmAmUmCm | NO: 647 | AUUAAUC | NO: 327 |
| ETXS803 | AmsUmsGmCmCmUmCfCmUfGfUfCmAmU | SEQ ID | AUGCCUCCUGUCAU | SEQ ID |
| | mCmAmAmAmGmUmGm | NO: 648 | CAAAGUG | NO: 328 |
| ETXS805 | AmsGmsUmAmUmGmAfGmAfUfGfCmAmU | SEQ ID | AGUAUGAGAUGCAU | SEQ ID |
| | mGmAmGmCmUmGmCm | NO: 649 | GAGCUGC | NO: 329 |
| ETXS807 | AmsAmsGmUmAmUmGfAmGfAfUfGmCmA | SEQ ID | AAGUAUGAGAUGCA | SEQ ID |
| | mUmGmAmGmCmUmGm | NO: 650 | UGAGCUG | NO: 330 |
| ETXS809 | UmsGmsUmCmCmUmCfAmAfAfCfUmGmC | SEQ ID | UGUCCUCAAACUGC | SEQ ID |
| | mCmCmUmAmCmCmAm | NO: 651 | CCUACCA | NO: 331 |
| ETXS811 | AmsCmsUmGmUmUmUfGmAfUfGfAmGmA | SEQ ID | ACUGUUUGAUGAGA | SEQ ID |
| | mUmUmAmAmUmCmCm | NO: 652 | UUAAUCC | NO: 332 |
| ETXS813 | GmsAmsCmCmAmUmUfAmAfGfGfUmGmC | SEQ ID | GACCAUUAAGGUGC | SEQ ID |
| | mCmCmAmUmGmAmUm | NO: 653 | CCAUGAU | NO: 333 |
| ETXS815 | AmsCmsCmAmUmUmAfAmGfGfUfGmCmC | SEQ ID | ACCAUUAAGGUGCC | SEQ ID |
| | mCmAmUmGmAmUmGm | NO: 654 | CAUGAUG | NO: 334 |
| ETXS817 | GmsUmsUmUmCmUmGfGmGfCfAfGmGmG | SEQ ID | GUUUCUGGGCAGGG | SEQ ID |
| | mUmGmGmUmGmAmAm | NO: 655 | UGGUGAA | NO: 335 |
| ETXS819 | UmsUmsCmUmGmUmUfUmCfUfGfGmGmC | SEQ ID | UUCUGUUUCUGGGC | SEQ ID |
| | mAmGmGmGmUmGmGm | NO: 656 | AGGGUGG | NO: 336 |
| ETXS821 | UmsUmsUmUmCmUmUfUmCfCfGfAmAmG | SEQ ID | UUUUCUUUCCGAAG | SEQ ID |
| | mUmUmCmAmAmGmCm | NO: 657 | UUCAAGC | NO: 337 |
| ETXS823 | UmsUmsUmCmUmUmUfCmCfGfAfAmGmU | SEQ ID | UUUCUUUCCGAAGU | SEQ ID |
| | mUmCmAmAmGmCmUm | NO: 658 | UCAAGCU | NO: 338 |
| ETXS825 | UmsCmsUmGmUmUmUfCmUfGfGfGmCmA | SEQ ID | UCUGUUUCUGGGCA | SEQ ID |
| | mGmGmGmUmGmGmUm | NO: 659 | GGGUGGU | NO: 339 |
| ETXS827 | AmsUmsGmUmCmCmUfCmAfAfAfCmUmG | SEQ ID | AUGUCCUCAAACUG | SEQ ID |
| | mCmCmCmUmAmCmCm | NO: 660 | CCCUACC | NO: 340 |
| ETXS829 | UmsCmsGmAmCmAmCfUmUfUfCfCmAmC | SEQ ID | UCGACACUUUCCAC | SEQ ID |
| | mCmUmGmGmAmCmAm | NO: 661 | CUGGACA | NO: 341 |
| ETXS831 | CfsCmsUfUmCfAmUfCmCfAmCfAmAfG | SEQ ID | CCUUCAUCCACAAG | SEQ ID |
| | mGfAmUfUmUf | NO: 662 | GAUUU | NO: 342 |
| ETXS833 | CfsGmsAfAmAfGmAfUmCfUmCfCmAfU | SEQ ID | CGAAAGAUCUCCAU | SEQ ID |
| | mGfAmGfGmCf | NO: 663 | GAGGC | NO: 343 |
| ETXS835 | UfsGmsGfUmGfGmUfCmCfUmCfAmUfG | SEQ ID | UGGUGGUCCUCAUG | SEQ ID |
| | mGfAmGfAmAf | NO: 664 | GAGAA | NO: 344 |
| ETXS837 | GfsAmsAfAmGfAmUfCmUfCmCfAmUfG | SEQ ID | GAAAGAUCUCCAUG | SEQ ID |
| | mAfGmGfCmAf | NO: 665 | AGGCA | NO: 345 |
| ETXS839 | AfsUmsGfAmGfAmUfGmCfAmUfGmAfG | SEQ ID | AUGAGAUGCAUGAG | SEQ ID |
| | mCfUmGfCmUf | NO: 666 | CUGCU | NO: 346 |
| ETXS841 | UfsUmsGfAmUfGmAfGmAfUmUfAmAfU | SEQ ID | UUGAUGAGAUUAAU | SEQ ID |
| | mCfCmUfGmAf | NO: 667 | CCUGA | NO: 347 |
| ETXS843 | AfsGmsAfUmUfAmAfUmCfCmUfGmAfA | SEQ ID | AGAUUAAUCCUGAA | SEQ ID |
| | mAfCmCfAmAf | NO: 668 | ACCAA | NO: 348 |
| ETXS845 | AfsUmsGfAmGfAmUfUmAfAmUfCmCfU | SEQ ID | AUGAGAUUAAUCCU | SEQ ID |
| | mGfAmAfAmCf | NO: 669 | GAAAC | NO: 349 |
| ETXS847 | GfsAmsGfAmUfUmAfAmUfCmCfUmGfA | SEQ ID | GAGAUUAAUCCUGA | SEQ ID |
| | mAfAmCfCmAf | NO: 670 | AACCA | NO: 350 |
| ETXS849 | UfsGmsAfGmAfUmUfAmAfUmCfCmUfG | SEQ ID | UGAGAUUAAUCCUG | SEQ ID |
| | mAfAmAfCmCf | NO: 671 | AAACC | NO: 351 |
| ETXS851 | GfsUmsUfUmGfAmUfGmAfGmAfUmUfA | SEQ ID | GUUUGAUGAGAUUA | SEQ ID |
| | mAfUmCfCmUf | NO: 672 | AUCCU | NO: 352 |
| ETXS853 | UfsUmsGfCmCfUmUfCmAfUmCfCmAfC | SEQ ID | UUGCCUUCAUCCAC | SEQ ID |
| | mAfAmGfGmAf | NO: 673 | AAGGA | NO: 353 |
| ETXS855 | AfsAmsAfGmAfUmCfUmCfCmAfUmGfA | SEQ ID | AAAGAUCUCCAUGA | SEQ ID |
| | mGfGmCfAmCf | NO: 674 | GGCAC | NO: 354 |
| ETXS857 | CfsUmsGfGmUfGmGfUmCfCmUfCmAfU | SEQ ID | CUGGUGGUCCUCAU | SEQ ID |
| | mGfGmAfGmAf | NO: 675 | GGAGA | NO: 355 |
| ETXS859 | UfsUmsCfAmUfCmCfAmCfAmAfGmGfA | SEQ ID | UUCAUCCACAAGGA | SEQ ID |
| | mUfUmUfUmGf | NO: 676 | UUUUG | NO: 356 |
| ETXS861 | AfsAmsGfAmUfCmUfCmCfAmUfGmAfG | SEQ ID | AAGAUCUCCAUGAG | SEQ ID |
| | mGfCmAfCmGf | NO: 677 | GCACG | NO: 357 |
| ETXS863 | CfsAmsUfCmCfAmCfAmAfGmGfAmUfU | SEQ ID | CAUCCACAAGGAUU | SEQ ID |
| | mUfUmGfAmUf | NO: 678 | UUGAU | NO: 358 |
| ETXS865 | UfsGmsAfUmGfAmGfAmUfUmAfAmUfC | SEQ ID | UGAUGAGAUUAAUC | SEQ ID |
| | mCfUmGfAmAf | NO: 679 | CUGAA | NO: 359 |
| ETXS867 | GfsCmsCfUmUfCmAfUmCfCmAfCmAfA | SEQ ID | GCCUUCAUCCACAA | SEQ ID |
| | mGfGmAfUmUf | NO: 680 | GGAUU | NO: 360 |
| ETXS869 | UfsCmsUfCmCfAmUfGmAfGmGfCmAfC | SEQ ID | UCUCCAUGAGGCAC | SEQ ID |
| | mGfAmUfGmGf | NO: 681 | GAUGG | NO: 361 |
| ETXS871 | UmsGmsCmCmUmUmCfAfUfCfCfAmCmA | SEQ ID | UGCCUUCAUCCACA | SEQ ID |
| | mAmGmGmAmUfUmUm | NO: 682 | AGGAUUU | NO: 242 |
| ETXS873 | UmsGmsCmGmAmAmAfGfAfUfCfUmCmC | SEQ ID | UGCGAAAGAUCUCC | SEQ ID |
| | mAmUmGmAmGfGmCm | NO: 683 | AUGAGGC | NO: 243 |
| ETXS875 | GmsCmsUmGmGmUmGfGfUfCfCfUmCmA | SEQ ID | GCUGGUGGUCCUCA | SEQ ID |
| | mUmGmGmAmGfAmAm | NO: 684 | UGGAGAA | NO: 244 |
| ETXS877 | GmsCmsGmAmAmAmGfAfUfCfUfCmCmA | SEQ ID | GCGAAAGAUCUCCA | SEQ ID |
| | mUmGmAmGmGfCmAm | NO: 685 | UGAGGCA | NO: 245 |
| ETXS879 | GmsUmsAmUmGmAmGfAfUfGfCfAmUmG | SEQ ID | GUAUGAGAUGCAUG | SEQ ID |
| | mAmGmCmUmGfCmUm | NO: 686 | AGCUGCU | NO: 246 |
| ETXS881 | GmsUmsUmUmGmAmUfGfAfGfAfUmUmA | SEQ ID | GUUUGAUGAGAUUA | SEQ ID |
| | mAmUmCmCmUfGmAm | NO: 687 | AUCCUGA | NO: 247 |
| ETXS883 | UmsGmsAmGmAmUmUfAfAfUfCfCmUmG | SEQ ID | UGAGAUUAAUCCUG | SEQ ID |
| | mAmAmAmCmCfAmAm | NO: 688 | AAACCAA | NO: 248 |
| ETXS885 | UmsGmsAmUmGmAmGfAfUfUfAfAmUmC | SEQ ID | UGAUGAGAUUAAUC | SEQ ID |
| | mCmUmGmAmAfAmCm | NO: 689 | CUGAAAC | NO: 249 |
| ETXS887 | AmsUmsGmAmGmAmUfUfAfAfUfCmCmU | SEQ ID | AUGAGAUUAAUCCU | SEQ ID |
| | mGmAmAmAmCfCmAm | NO: 690 | GAAACCA | NO: 250 |
| ETXS889 | GmsAmsUmGmAmGmAfUfUfAfAfUmCmC | SEQ ID | GAUGAGAUUAAUCC | SEQ ID |
| | mUmGmAmAmAfCmCm | NO: 691 | UGAAACC | NO: 251 |
| ETXS891 | CmsUmsGmUmUmUmGfAfUfGfAfGmAmU | SEQ ID | CUGUUUGAUGAGAU | SEQ ID |
| | mUmAmAmUmCfCmUm | NO: 692 | UAAUCCU | NO: 252 |
| ETXS893 | UmsUmsUmUmGmCmCfUfUfCfAfUmCmC | SEQ ID | UUUUGCCUUCAUCC | SEQ ID |
| | mAmCmAmAmGfGmAm | NO: 693 | ACAAGGA | NO: 253 |
| ETXS895 | CmsGmsAmAmAmGmAfUfCfUfCfCmAmU | SEQ ID | CGAAAGAUCUCCAU | SEQ ID |
| | mGmAmGmGmCfAmCm | NO: 694 | GAGGCAC | NO: 254 |
| ETXS897 | UmsGmsCmUmGmGmUfGfGfUfCfCmUmC | SEQ ID | UGCUGGUGGUCCUC | SEQ ID |
| | mAmUmGmGmAfGmAm | NO: 695 | AUGGAGA | NO: 255 |
| ETXS899 | CmsCmsUmUmCmAmUfCfCfAfCfAmAmG | SEQ ID | CCUUCAUCCACAAG | SEQ ID |
| | mGmAmUmUmUfUmGm | NO: 696 | GAUUUUG | NO: 256 |
| ETXS901 | GmsAmsAmAmGmAmUfCfUfCfCfAmUmG | SEQ ID | GAAAGAUCUCCAUG | SEQ ID |
| | mAmGmGmCmAfCmGm | NO: 697 | AGGCACG | NO: 257 |
| ETXS903 | UmsUmsCmAmUmCmCfAfCfAfAfGmGmA | SEQ ID | UUCAUCCACAAGGA | SEQ ID |
| | mUmUmUmUmGfAmUm | NO: 698 | UUUUGAU | NO: 258 |
| ETXS905 | UmsUmsUmGmAmUmGfAfGfAfUfUmAmA | SEQ ID | UUUGAUGAGAUUAA | SEQ ID |
| | mUmCmCmUmGfAmAm | NO: 699 | UCCUGAA | NO: 259 |
| ETXS907 | UmsUmsGmCmCmUmUfCfAfUfCfCmAmC | SEQ ID | UUGCCUUCAUCCAC | SEQ ID |
| | mAmAmGmGmAfUmUm | NO: 700 | AAGGAUU | NO: 260 |
| ETXS909 | GmsAmsUmCmUmCmCfAfUfGfAfGmGmC | SEQ ID | GAUCUCCAUGAGGC | SEQ ID |
| | mAmCmGmAmUfGmGm | NO: 701 | ACGAUGG | NO: 261 |
| ETXS911 | UmsGmsCmCmUmUfCfAmUfCfCfAfCmA | SEQ ID | UGCCUUCAUCCACA | SEQ ID |
| | mAmGmGmAmUmUmUm | NO: 702 | AGGAUUU | NO: 242 |
| ETXS913 | UmsGmsCmGmAmAfAfGmAfUfCfUfCmC | SEQ ID | UGCGAAAGAUCUCC | SEQ ID |
| | mAmUmGmAmGmGmCm | NO: 703 | AUGAGGC | NO: 243 |
| ETXS915 | GmsCmsUmGmGmUfGfGmUfCfCfUfCmA | SEQ ID | GCUGGUGGUCCUCA | SEQ ID |
| | mUmGmGmAmGmAmAm | NO: 704 | UGGAGAA | NO: 244 |
| ETXS917 | GmsCmsGmAmAmAfGfAmUfCfUfCfCmA | SEQ ID | GCGAAAGAUCUCCA | SEQ ID |
| | mUmGmAmGmGmCmAm | NO: 705 | UGAGGCA | NO: 245 |
| ETXS919 | GmsUmsAmUmGmAfGfAmUfGfCfAfUmG | SEQ ID | GUAUGAGAUGCAUG | SEQ ID |
| | mAmGmCmUmGmCmUm | NO: 706 | AGCUGCU | NO: 246 |
| ETXS921 | GmsUmsUmUmGmAfUfGmAfGfAfUfUmA | SEQ ID | GUUUGAUGAGAUUA | SEQ ID |
| | mAmUmCmCmUmGmAm | NO: 707 | AUCCUGA | NO: 247 |
| ETXS923 | UmsGmsAmGmAmUfUfAmAfUfCfCfUmG | SEQ ID | UGAGAUUAAUCCUG | SEQ ID |
| | mAmAmAmCmCmAmAm | NO: 708 | AAACCAA | NO: 248 |
| ETXS925 | UmsGmsAmUmGmAfGfAmUfUfAfAfUmC | SEQ ID | UGAUGAGAUUAAUC | SEQ ID |
| | mCmUmGmAmAmAmCm | NO: 709 | CUGAAAC | NO: 249 |
| ETXS927 | AmsUmsGmAmGmAfUfUmAfAfUfCfCmU | SEQ ID | AUGAGAUUAAUCCU | SEQ ID |
| | mGmAmAmAmCmCmAm | NO: 710 | GAAACCA | NO: 250 |
| ETXS929 | GmsAmsUmGmAmGfAfUmUfAfAfUfCmC | SEQ ID | GAUGAGAUUAAUCC | SEQ ID |
| | mUmGmAmAmAmCmCm | NO: 711 | UGAAACC | NO: 251 |
| ETXS931 | CmsUmsGmUmUmUfGfAmUfGfAfGfAmU | SEQ ID | CUGUUUGAUGAGAU | SEQ ID |
| | mUmAmAmUmCmCmUm | NO: 712 | UAAUCCU | NO: 252 |
| ETXS933 | UmsUmsUmUmGmCfCfUmUfCfAfUfCmC | SEQ ID | UUUUGCCUUCAUCC | SEQ ID |
| | mAmCmAmAmGmGmAm | NO: 713 | ACAAGGA | NO: 253 |
| ETXS935 | CmsGmsAmAmAmGfAfUmCfUfCfCfAmU | SEQ ID | CGAAAGAUCUCCAU | SEQ ID |
| | mGmAmGmGmCmAmCm | NO: 714 | GAGGCAC | NO: 254 |
| ETXS937 | UmsGmsCmUmGmGfUfGmGfUfCfCfUmC | SEQ ID | UGCUGGUGGUCCUC | SEQ ID |
| | mAmUmGmGmAmGmAm | NO: 715 | AUGGAGA | NO: 255 |
| ETXS939 | CmsCmsUmUmCmAfUfCmCfAfCfAfAmG | SEQ ID | CCUUCAUCCACAAG | SEQ ID |
| | mGmAmUmUmUmUmGm | NO: 716 | GAUUUUG | NO: 256 |
| ETXS941 | GmsAmsAmAmGmAfUfCmUfCfCfAfUmG | SEQ ID | GAAAGAUCUCCAUG | SEQ ID |
| | mAmGmGmCmAmCmGm | NO: 717 | AGGCACG | NO: 257 |
| ETXS943 | UmsUmsCmAmUmCfCfAmCfAfAfGfGmA | SEQ ID | UUCAUCCACAAGGA | SEQ ID |
| | mUmUmUmUmGmAmUm | NO: 718 | UUUUGAU | NO: 258 |
| ETXS945 | UmsUmsUmGmAmUfGfAmGfAfUfUfAmA | SEQ ID | UUUGAUGAGAUUAA | SEQ ID |
| | mUmCmCmUmGmAmAm | NO: 719 | UCCUGAA | NO: 259 |
| ETXS947 | UmsUmsGmCmCmUfUfCmAfUfCfCfAmC | SEQ ID | UUGCCUUCAUCCAC | SEQ ID |
| | mAmAmGmGmAmUmUm | NO: 720 | AAGGAUU | NO: 260 |
| ETXS949 | GmsAmsUmCmUmCfCfAmUfGfAfGfGmC | SEQ ID | GAUCUCCAUGAGGC | SEQ ID |
| | mAmCmGmAmUmGmGm | NO: 721 | ACGAUGG | NO: 261 |
| ETXS951 | UmsGmsCmCmUmUmCfAmUfCfCfAfCmA | SEQ ID | UGCCUUCAUCCACA | SEQ ID |
| | mAmGmGmAmUmUmUm | NO: 722 | AGGAUUU | NO: 242 |
| ETXS953 | UmsGmsCmGmAmAmAfGmAfUfCfUfCmC | SEQ ID | UGCGAAAGAUCUCC | SEQ ID |
| | mAmUmGmAmGmGmCm | NO: 723 | AUGAGGC | NO: 243 |
| ETXS955 | GmsCmsUmGmGmUmGfGmUfCfCfUfCmA | SEQ ID | GCUGGUGGUCCUCA | SEQ ID |
| | mUmGmGmAmGmAmAm | NO: 724 | UGGAGAA | NO: 244 |
| ETXS957 | GmsCmsGmAmAmAmGfAmUfCfUfCfCmA | SEQ ID | GCGAAAGAUCUCCA | SEQ ID |
| | mUmGmAmGmGmCmAm | NO: 725 | UGAGGCA | NO: 245 |
| ETXS959 | GmsUmsAmUmGmAmGfAmUfGfCfAfUmG | SEQ ID | GUAUGAGAUGCAUG | SEQ ID |
| | mAmGmCmUmGmCmUm | NO: 726 | AGCUGCU | NO: 246 |
| ETXS961 | GmsUmsUmUmGmAmUfGmAfGfAfUfUmA | SEQ ID | GUUUGAUGAGAUUA | SEQ ID |
| | mAmUmCmCmUmGmAm | NO: 727 | AUCCUGA | NO: 247 |
| ETXS963 | UmsGmsAmGmAmUmUfAmAfUfCfCfUmG | SEQ ID | UGAGAUUAAUCCUG | SEQ ID |
| | mAmAmAmCmCmAmAm | NO: 728 | AAACCAA | NO: 248 |
| ETXS965 | UmsGmsAmUmGmAmGfAmUfUfAfAfUmC | SEQ ID | UGAUGAGAUUAAUC | SEQ ID |
| | mCmUmGmAmAmAmCm | NO: 729 | CUGAAAC | NO: 249 |
| ETXS967 | AmsUmsGmAmGmAmUfUmAfAfUfCfCmU | SEQ ID | AUGAGAUUAAUCCU | SEQ ID |
| | mGmAmAmAmCmCmAm | NO: 730 | GAAACCA | NO: 250 |
| ETXS969 | GmsAmsUmGmAmGmAfUmUfAfAfUfCmC | SEQ ID | GAUGAGAUUAAUCC | SEQ ID |
| | mUmGmAmAmAmCmCm | NO: 731 | UGAAACC | NO: 251 |
| ETXS971 | CmsUmsGmUmUmUmGfAmUfGfAfGfAmU | SEQ ID | CUGUUUGAUGAGAU | SEQ ID |
| | mUmAmAmUmCmCmUm | NO: 732 | UAAUCCU | NO: 252 |
| ETXS973 | UmsUmsUmUmGmCmCfUmUfCfAfUfCmC | SEQ ID | UUUUGCCUUCAUCC | SEQ ID |
| | mAmCmAmAmGmGmAm | NO: 733 | ACAAGGA | NO: 253 |
| ETXS975 | CmsGmsAmAmAmGmAfUmCfUfCfCfAmU | SEQ ID | CGAAAGAUCUCCAU | SEQ ID |
| | mGmAmGmGmCmAmCm | NO: 734 | GAGGCAC | NO: 254 |
| ETXS977 | UmsGmsCmUmGmGmUfGmGfUfCfCfUmC | SEQ ID | UGCUGGUGGUCCUC | SEQ ID |
| | mAmUmGmGmAmGmAm | NO: 735 | AUGGAGA | NO: 255 |
| ETXS979 | CmsCmsUmUmCmAmUfCmCfAfCfAfAmG | SEQ ID | CCUUCAUCCACAAG | SEQ ID |
| | mGmAmUmUmUmUmGm | NO: 736 | GAUUUUG | NO: 256 |
| ETXS981 | GmsAmsAmAmGmAmUfCmUfCfCfAfUmG | SEQ ID | GAAAGAUCUCCAUG | SEQ ID |
| | mAmGmGmCmAmCmGm | NO: 737 | AGGCACG | NO: 257 |
| ETXS983 | UmsUmsCmAmUmCmCfAmCfAfAfGfGmA | SEQ ID | UUCAUCCACAAGGA | SEQ ID |
| | mUmUmUmUmGmAmUm | NO: 738 | UUUUGAU | NO: 258 |
| ETXS985 | UmsUmsUmGmAmUmGfAmGfAfUfUfAmA | SEQ ID | UUUGAUGAGAUUAA | SEQ ID |
| | mUmCmCmUmGmAmAm | NO: 739 | UCCUGAA | NO: 259 |
| ETXS987 | UmsUmsGmCmCmUmUfCmAfUfCfCfAmC | SEQ ID | UUGCCUUCAUCCAC | SEQ ID |
| | mAmAmGmGmAmUmUm | NO: 740 | AAGGAUU | NO: 260 |
| ETXS989 | GmsAmsUmCmUmCmCfAmUfGfAfGfGmC | SEQ ID | GAUCUCCAUGAGGC | SEQ ID |
| | mAmCmGmAmUmGmGm | NO: 741 | ACGAUGG | NO: 261 |
| ETXS991 | UmsGmsCmCmUmUmCfAmUfCfCfAfCmA | SEQ ID | UGCCUUCAUCCACA | SEQ ID |
| | mAmGmGmAmUmUmUm | NO: 742 | AGGAUUU | NO: 242 |
| ETXS993 | UmsGmsCmGmAmAmAfGmAfUfCfUfCmC | SEQ ID | UGCGAAAGAUCUCC | SEQ ID |
| | mAmUmGmAmGmGmCm | NO: 743 | AUGAGGC | NO: 243 |
| ETXS995 | GmsCmsUmGmGmUmGfGmUfCfCfUfCmA | SEQ ID | GCUGGUGGUCCUCA | SEQ ID |
| | mUmGmGmAmGmAmAm | NO: 744 | UGGAGAA | NO: 244 |
| ETXS997 | GmsCmsGmAmAmAmGfAmUfCfUfCfCmA | SEQ ID | GCGAAAGAUCUCCA | SEQ ID |
| | mUmGmAmGmGmCmAm | NO: 745 | UGAGGCA | NO: 245 |
| ETXS999 | GmsUmsAmUmGmAmGfAmUfGfCfAfUmG | SEQ ID | GUAUGAGAUGCAUG | SEQ ID |
| | mAmGmCmUmGmCmUm | NO: 746 | AGCUGCU | NO: 246 |
| ETXS1001 | GmsUmsUmUmGmAmUfGmAfGfAfUfUmA | SEQ ID | GUUUGAUGAGAUUA | SEQ ID |
| | mAmUmCmCmUmGmAm | NO: 747 | AUCCUGA | NO: 247 |
| ETXS1003 | UmsGmsAmGmAmUmUfAmAfUfCfCfUmG | SEQ ID | UGAGAUUAAUCCUG | SEQ ID |
| | mAmAmAmCmCmAmAm | NO: 748 | AAACCAA | NO: 248 |
| ETXS1005 | UmsGmsAmUmGmAmGfAmUfUfAfAfUmC | SEQ ID | UGAUGAGAUUAAUC | SEQ ID |
| | mCmUmGmAmAmAmCm | NO: 749 | CUGAAAC | NO: 249 |
| ETXS1007 | AmsUmsGmAmGmAmUfUmAfAfUfCfCmU | SEQ ID | AUGAGAUUAAUCCU | SEQ ID |
| | mGmAmAmAmCmCmAm | NO: 750 | GAAACCA | NO: 250 |
| ETXS1009 | GmsAmsUmGmAmGmAfUmUfAfAfUfCmC | SEQ ID | GAUGAGAUUAAUCC | SEQ ID |
| | mUmGmAmAmAmCmCm | NO: 751 | UGAAACC | NO: 251 |
| ETXS1011 | CmsUmsGmUmUmUmGfAmUfGfAfGfAmU | SEQ ID | CUGUUUGAUGAGAU | SEQ ID |
| | mUmAmAmUmCmCmUm | NO: 752 | UAAUCCU | NO: 252 |
| ETXS1013 | UmsUmsUmUmGmCmCfUmUfCfAfUfCmC | SEQ ID | UUUUGCCUUCAUCC | SEQ ID |
| | mAmCmAmAmGmGmAm | NO: 753 | ACAAGGA | NO: 253 |
| ETXS1015 | CmsGmsAmAmAmGmAfUmCfUfCfCfAmU | SEQ ID | CGAAAGAUCUCCAU | SEQ ID |
| | mGmAmGmGmCmAmCm | NO: 754 | GAGGCAC | NO: 254 |
| ETXS1017 | UmsGmsCmUmGmGmUfGmGfUfCfCfUmC | SEQ ID | UGCUGGUGGUCCUC | SEQ ID |
| | mAmUmGmGmAmGmAm | NO: 755 | AUGGAGA | NO: 255 |
| ETXS1019 | CmsCmsUmUmCmAmUfCmCfAfCfAfAmG | SEQ ID | CCUUCAUCCACAAG | SEQ ID |
| | mGmAmUmUmUmUmGm | NO: 756 | GAUUUUG | NO: 256 |
| ETXS1021 | GmsAmsAmAmGmAmUfCmUfCfCfAfUmG | SEQ ID | GAAAGAUCUCCAUG | SEQ ID |
| | mAmGmGmCmAmCmGm | NO: 757 | AGGCACG | NO: 257 |
| ETXS1023 | UmsUmsCmAmUmCmCfAmCfAfAfGfGmA | SEQ ID | UUCAUCCACAAGGA | SEQ ID |
| | mUmUmUmUmGmAmUm | NO: 758 | UUUUGAU | NO: 258 |
| ETXS1025 | UmsUmsUmGmAmUmGfAmGfAfUfUfAmA | SEQ ID | UUUGAUGAGAUUAA | SEQ ID |
| | mUmCmCmUmGmAmAm | NO: 759 | UCCUGAA | NO: 259 |
| ETXS1027 | UmsUmsGmCmCmUmUfCmAfUfCfCfAmC | SEQ ID | UUGCCUUCAUCCAC | SEQ ID |
| | mAmAmGmGmAmUmUm | NO: 760 | AAGGAUU | NO: 260 |
| ETXS1029 | GmsAmsUmCmUmCmCfAmUfGfAfGfGmC | SEQ ID | GAUCUCCAUGAGGC | SEQ ID |
| | mAmCmGmAmUmGmGm | NO: 761 | ACGAUGG | NO: 261 |
| ETXS1031 | iaiaGmsCmsCmUmUmCmAfUmCfCfAfC | SEQ ID | GCCUUCAUCCACAA | SEQ ID |
| | fAmAmGmGmAmUmUmUmUm | NO: 772 | GGAUUUU | NO: 264 |
| ETXS1033 | iaiaGmsCmsCmUmUmCmAmUmCfCfAfC | SEQ ID | GCCUUCAUCCACAA | SEQ ID |
| | mAmAmGmGmAmUmUmUmUm | NO: 773 | GGAUUUU | NO: 264 |
| ETXS1035 | iaiaUmsAmsCmCmAmAmGfGmAfAfAfU | SEQ ID | UACCAAGGAAAUGC | SEQ ID |
| | fGmCmCmAmCmCmAmUmGm | NO: 774 | CACCAUG | NO: 265 |
| ETXS1037 | iaiaUmsAmsCmCmAmAmGmGmAfAfAfU | SEQ ID | UACCAAGGAAAUGC | SEQ ID |
| | mGmCmCmAmCmCmAmUmGm | NO: 775 | CACCAUG | NO: 265 |
| ETXS1039 | iaiaAmsAmsAmGmAmUmCfUmCfCfAfU | SEQ ID | AAAGAUCUCCAUGA | SEQ ID |
| | fGmAmGmGmCmAmCmGmAm | NO: 776 | GGCACGA | NO: 268 |
| ETXS1041 | iaiaAmsAmsAmGmAmUmCmUmCfCfAfU | SEQ ID | AAAGAUCUCCAUGA | SEQ ID |
| | mGmAmGmGmCmAmCmGmAm | NO: 777 | GGCACGA | NO: 268 |
| ETXS1043 | iaiaCmsUmsCmCmAmCmCfUmUfUfGfA | SEQ ID | CUCCACCUUUGACA | SEQ ID |
| | fCmAmAmGmAmAmUmUmUm | NO: 778 | AGAAUUU | NO: 285 |
| ETXS1045 | iaiaCmsUmsCmCmAmCmCmUmUfUfGfA | SEQ ID | CUCCACCUUUGACA | SEQ ID |
| | mCmAmAmGmAmAmUmUmUm | NO: 779 | AGAAUUU | NO: 285 |
| ETXS1047 | iaiaGmsGmsAmGmUmUmUfUmGfCfCfU | SEQ ID | GGAGUUUUGCCUUC | SEQ ID |
| | fUmCmAmUmCmCmAmCmAm | NO: 780 | AUCCACA | NO: 322 |
| ETXS1049 | iaiaGmsGmsAmGmUmUmUmUmGfCfCfU | SEQ ID | GGAGUUUUGCCUUC | SEQ ID |
| | mUmCmAmUmCmCmAmCmAm | NO: 781 | AUCCACA | NO: 322 |
| ETXS2127 | GmsCmsCmUmUmCmAfUmCfCfAfCmAmA | SEQ ID | GCCUUCAUCCACAA | SEQ ID |
| | mGmGmAmCmUmUmUm | NO: 798 | GGACUUU | NO: 791 |
| ETXS2143 | CmsUmsCmCmAmCmCfUmUfUfGfAmCmA | SEQ ID | CUCCACCUUUGACA | SEQ ID |
| | mAmGmAmAmGmUmUm | NO: 799 | AGAAGUU | NO: 792 |
| ETXS2151 | GmsUmsAmGmCmUmUfUmGfCfCfUmUmC | SEQ ID | GUAGCUUUGCCUUC | SEQ ID |
| | mAmUmCmCmAmCmAm | NO: 800 | AUCCACA | NO: 793 |

[0206] As used herein, and in particular in Tables 3 and 4, the following abbreviations are used for modified nucleosides:

[0207] Am stands for 2′-O-methyl-adenosine, Cm stands for 2′-O-methyl-cytidine, Gm stands for 2′-O-methyl-guanosine, Um stands for 2′-O-methyl-uridine, Af stands for 2′-Fluoro-adenosine, Cf stands for 2′-Fluoro-cytidine, Gf stands for 2′-Fluoro-guanosine and Uf stands for 2′-Fluoro-uridine.

[0208] Furthermore, the letter “s” is used as abbreviation for a phosphorothioate linkage between two consecutive (modified) nucleosides. For example, the abbreviation “AmsAm” is used for two consecutive 2′-O-methyl-adenosine nucleosides that are linked via a 3′5′ phosphorothioate linkage. No abbreviation is used for nucleosides that are linked via a standard 3′5′ phosphodiester linkage. For example, the abbreviation “AmAm” is used for two consecutive 2′-O-methyl-adenosine nucleosides that are linked via a 3′5′ phosphodiester linkage.

[0209] In certain embodiments, the nucleic acid comprises a first strand that comprises, consists of, or consists essentially ofa (modified) nucleoside sequence differing by 0 or 1 nucleosides from any one of SEQ ID NO:362-561, 762-771, 782-786 or 795-797;
[0210] and a second strand that comprises, consists of, or consists essentially of a (modified) nucleoside sequence differing by 0 or 1 nucleosides from any one of SEQ ID NO:562-761, 772-781 or 798-800.

[0211] Preferred combinations of complementary modified antisense (first) and sense (second) strands are listed below in Table 5:

TABLE 5

| Duplex ID | First (Antisense) strand ID | Second (Sense) strand ID |
|---|---|---|
| ETXM316 | ETXS632 (SEQ ID NO: 362) | ETXS631 (SEQ ID NO: 562) |
| ETXM317 | ETXS634 (SEQ ID NO: 363) | ETXS633 (SEQ ID NO: 563) |
| ETXM318 | ETXS636 (SEQ ID NO: 364) | ETXS635 (SEQ ID NO: 564) |
| ETXM319 | ETXS638 (SEQ ID NO: 365) | ETXS637 (SEQ ID NO: 565) |
| ETXM320 | ETXS640 (SEQ ID NO: 366) | ETXS639 (SEQ ID NO: 566) |
| ETXM321 | ETXS642 (SEQ ID NO: 367) | ETXS641 (SEQ ID NO: 567) |
| ETXM322 | ETXS644 (SEQ ID NO: 368) | ETXS643 (SEQ ID NO: 568) |
| ETXM323 | ETXS646 (SEQ ID NO: 369) | ETXS645 (SEQ ID NO: 569) |
| ETXM324 | ETXS648 (SEQ ID NO: 370) | ETXS647 (SEQ ID NO: 570) |
| ETXM325 | ETXS650 (SEQ ID NO: 371) | ETXS649 (SEQ ID NO: 571) |
| ETXM326 | ETXS652 (SEQ ID NO: 372) | ETXS651 (SEQ ID NO: 572) |
| ETXM327 | ETXS654 (SEQ ID NO: 373) | ETXS653 (SEQ ID NO: 573) |
| ETXM328 | ETXS656 (SEQ ID NO: 374) | ETXS655 (SEQ ID NO: 574) |
| ETXM329 | ETXS658 (SEQ ID NO: 375) | ETXS657 (SEQ ID NO: 575) |
| ETXM330 | ETXS660 (SEQ ID NO: 376) | ETXS659 (SEQ ID NO: 576) |
| ETXM331 | ETXS662 (SEQ ID NO: 377) | ETXS661 (SEQ ID NO: 577) |
| ETXM332 | ETXS664 (SEQ ID NO: 378) | ETXS663 (SEQ ID NO: 578) |
| ETXM333 | ETXS666 (SEQ ID NO: 379) | ETXS665 (SEQ ID NO: 579) |
| ETXM334 | ETXS668 (SEQ ID NO: 380) | ETXS667 (SEQ ID NO: 580) |
| ETXM335 | ETXS670 (SEQ ID NO: 381) | ETXS669 (SEQ ID NO: 581) |
| ETXM336 | ETXS672 (SEQ ID NO: 382) | ETXS671 (SEQ ID NO: 582) |
| ETXM337 | ETXS674 (SEQ ID NO: 383) | ETXS673 (SEQ ID NO: 583) |
| ETXM338 | ETXS676 (SEQ ID NO: 384) | ETXS675 (SEQ ID NO: 584) |
| ETXM339 | ETXS678 (SEQ ID NO: 385) | ETXS677 (SEQ ID NO: 585) |
| ETXM340 | ETXS680 (SEQ ID NO: 386) | ETXS679 (SEQ ID NO: 586) |
| ETXM341 | ETXS682 (SEQ ID NO: 387) | ETXS681 (SEQ ID NO: 587) |
| ETXM342 | ETXS684 (SEQ ID NO: 388) | ETXS683 (SEQ ID NO: 588) |
| ETXM343 | ETXS686 (SEQ ID NO: 389) | ETXS685 (SEQ ID NO: 589) |
| ETXM344 | ETXS688 (SEQ ID NO: 390) | ETXS687 (SEQ ID NO: 590) |
| ETXM345 | ETXS690 (SEQ ID NO: 391) | ETXS689 (SEQ ID NO: 591) |
| ETXM346 | ETXS692 (SEQ ID NO: 392) | ETXS691 (SEQ ID NO: 592) |
| ETXM347 | ETXS694 (SEQ ID NO: 393) | ETXS693 (SEQ ID NO: 593) |
| ETXM348 | ETXS696 (SEQ ID NO: 394) | ETXS695 (SEQ ID NO: 594) |
| ETXM349 | ETXS698 (SEQ ID NO: 395) | ETXS697 (SEQ ID NO: 595) |
| ETXM350 | ETXS700 (SEQ ID NO: 396) | ETXS699 (SEQ ID NO: 596) |
| ETXM351 | ETXS702 (SEQ ID NO: 397) | ETXS701 (SEQ ID NO: 597) |
| ETXM352 | ETXS704 (SEQ ID NO: 398) | ETXS703 (SEQ ID NO: 598) |
| ETXM353 | ETXS706 (SEQ ID NO: 399) | ETXS705 (SEQ ID NO: 599) |
| ETXM354 | ETXS708 (SEQ ID NO: 400) | ETXS707 (SEQ ID NO: 600) |
| ETXM355 | ETXS710 (SEQ ID NO: 401) | ETXS709 (SEQ ID NO: 601) |
| ETXM356 | ETXS712 (SEQ ID NO: 402) | ETXS711 (SEQ ID NO: 602) |
| ETXM357 | ETXS714 (SEQ ID NO: 403) | ETXS713 (SEQ ID NO: 603) |
| ETXM358 | ETXS716 (SEQ ID NO: 404) | ETXS715 (SEQ ID NO: 604) |
| ETXM359 | ETXS718 (SEQ ID NO: 405) | ETXS717 (SEQ ID NO: 605) |
| ETXM360 | ETXS720 (SEQ ID NO: 406) | ETXS719 (SEQ ID NO: 606) |
| ETXM361 | ETXS722 (SEQ ID NO: 407) | ETXS721 (SEQ ID NO: 607) |
| ETXM362 | ETXS724 (SEQ ID NO: 408) | ETXS723 (SEQ ID NO: 608) |
| ETXM363 | ETXS726 (SEQ ID NO: 409) | ETXS725 (SEQ ID NO: 609) |
| ETXM364 | ETXS728 (SEQ ID NO: 410) | ETXS727 (SEQ ID NO: 610) |
| ETXM365 | ETXS730 (SEQ ID NO: 411) | ETXS729 (SEQ ID NO: 611) |
| ETXM366 | ETXS732 (SEQ ID NO: 412) | ETXS731 (SEQ ID NO: 612) |
| ETXM367 | ETXS734 (SEQ ID NO: 413) | ETXS733 (SEQ ID NO: 613) |
| ETXM368 | ETXS736 (SEQ ID NO: 414) | ETXS735 (SEQ ID NO: 614) |
| ETXM369 | ETXS738 (SEQ ID NO: 415) | ETXS737 (SEQ ID NO: 615) |
| ETXM370 | ETXS740 (SEQ ID NO: 416) | ETXS739 (SEQ ID NO: 616) |
| ETXM371 | ETXS742 (SEQ ID NO: 417) | ETXS741 (SEQ ID NO: 617) |
| ETXM372 | ETXS744 (SEQ ID NO: 418) | ETXS743 (SEQ ID NO: 618) |
| ETXM373 | ETXS746 (SEQ ID NO: 419) | ETXS745 (SEQ ID NO: 619) |
| ETXM374 | ETXS748 (SEQ ID NO: 420) | ETXS747 (SEQ ID NO: 620) |
| ETXM375 | ETXS750 (SEQ ID NO: 421) | ETXS749 (SEQ ID NO: 621) |
| ETXM376 | ETXS752 (SEQ ID NO: 422) | ETXS751 (SEQ ID NO: 622) |
| ETXM377 | ETXS754 (SEQ ID NO: 423) | ETXS753 (SEQ ID NO: 623) |
| ETXM378 | ETXS756 (SEQ ID NO: 424) | ETXS755 (SEQ ID NO: 624) |
| ETXM379 | ETXS758 (SEQ ID NO: 425) | ETXS757 (SEQ ID NO: 625) |
| ETXM380 | ETXS760 (SEQ ID NO: 426) | ETXS759 (SEQ ID NO: 626) |
| ETXM381 | ETXS762 (SEQ ID NO: 427) | ETXS761 (SEQ ID NO: 627) |
| ETXM382 | ETXS764 (SEQ ID NO: 428) | ETXS763 (SEQ ID NO: 628) |
| ETXM383 | ETXS766 (SEQ ID NO: 429) | ETXS765 (SEQ ID NO: 629) |
| ETXM384 | ETXS768 (SEQ ID NO: 430) | ETXS767 (SEQ ID NO: 630) |
| ETXM385 | ETXS770 (SEQ ID NO: 431) | ETXS769 (SEQ ID NO: 631) |
| ETXM386 | ETXS772 (SEQ ID NO: 432) | ETXS771 (SEQ ID NO: 632) |
| ETXM387 | ETXS774 (SEQ ID NO: 433) | ETXS773 (SEQ ID NO: 633) |
| ETXM388 | ETXS776 (SEQ ID NO: 434) | ETXS775 (SEQ ID NO: 634) |
| ETXM389 | ETXS778 (SEQ ID NO: 435) | ETXS777 (SEQ ID NO: 635) |
| ETXM390 | ETXS780 (SEQ ID NO: 436) | ETXS779 (SEQ ID NO: 636) |
| ETXM391 | ETXS782 (SEQ ID NO: 437) | ETXS781 (SEQ ID NO: 637) |
| ETXM392 | ETXS784 (SEQ ID NO: 438) | ETXS783 (SEQ ID NO: 638) |
| ETXM393 | ETXS786 (SEQ ID NO: 439) | ETXS785 (SEQ ID NO: 639) |
| ETXM394 | ETXS788 (SEQ ID NO: 440) | ETXS787 (SEQ ID NO: 640) |
| ETXM395 | ETXS790 (SEQ ID NO: 441) | ETXS789 (SEQ ID NO: 641) |
| ETXM396 | ETXS792 (SEQ ID NO: 442) | ETXS791 (SEQ ID NO: 642) |
| ETXM397 | ETXS794 (SEQ ID NO: 443) | ETXS793 (SEQ ID NO: 643) |
| ETXM398 | ETXS796 (SEQ ID NO: 444) | ETXS795 (SEQ ID NO: 644) |
| ETXM399 | ETXS798 (SEQ ID NO: 445) | ETXS797 (SEQ ID NO: 645) |
| ETXM400 | ETXS800 (SEQ ID NO: 446) | ETXS799 (SEQ ID NO: 646) |
| ETXM401 | ETXS802 (SEQ ID NO: 447) | ETXS801 (SEQ ID NO: 647) |
| ETXM402 | ETXS804 (SEQ ID NO: 448) | ETXS803 (SEQ ID NO: 648) |
| ETXM403 | ETXS806 (SEQ ID NO: 449) | ETXS805 (SEQ ID NO: 649) |
| ETXM404 | ETXS808 (SEQ ID NO: 450) | ETXS807 (SEQ ID NO: 650) |
| ETXM405 | ETXS810 (SEQ ID NO: 451) | ETXS809 (SEQ ID NO: 651) |
| ETXM406 | ETXS812 (SEQ ID NO: 452) | ETXS811 (SEQ ID NO: 652) |
| ETXM407 | ETXS814 (SEQ ID NO: 453) | ETXS813 (SEQ ID NO: 653) |
| ETXM408 | ETXS816 (SEQ ID NO: 454) | ETXS815 (SEQ ID NO: 654) |
| ETXM409 | ETXS818 (SEQ ID NO: 455) | ETXS817 (SEQ ID NO: 655) |
| ETXM410 | ETXS820 (SEQ ID NO: 456) | ETXS819 (SEQ ID NO: 656) |
| ETXM411 | ETXS822 (SEQ ID NO: 457) | ETXS821 (SEQ ID NO: 657) |
| ETXM412 | ETXS824 (SEQ ID NO: 458) | ETXS823 (SEQ ID NO: 658) |
| ETXM413 | ETXS826 (SEQ ID NO: 459) | ETXS825 (SEQ ID NO: 659) |
| ETXM414 | ETXS828 (SEQ ID NO: 460) | ETXS827 (SEQ ID NO: 660) |
| ETXM415 | ETXS830 (SEQ ID NO: 461) | ETXS829 (SEQ ID NO: 661) |
| ETXM416 | ETXS832 (SEQ ID NO: 462) | ETXS831 (SEQ ID NO: 662) |
| ETXM417 | ETXS834 (SEQ ID NO: 463) | ETXS833 (SEQ ID NO: 663) |
| ETXM418 | ETXS836 (SEQ ID NO: 464) | ETXS835 (SEQ ID NO: 664) |
| ETXM419 | ETXS838 (SEQ ID NO: 465) | ETXS837 (SEQ ID NO: 665) |
| ETXM420 | ETXS840 (SEQ ID NO: 466) | ETXS839 (SEQ ID NO: 666) |
| ETXM421 | ETXS842 (SEQ ID NO: 467) | ETXS841 (SEQ ID NO: 667) |
| ETXM422 | ETXS844 (SEQ ID NO: 468) | ETXS843 (SEQ ID NO: 668) |
| ETXM423 | ETXS846 (SEQ ID NO: 469) | ETXS845 (SEQ ID NO: 669) |
| ETXM424 | ETXS848 (SEQ ID NO: 470) | ETXS847 (SEQ ID NO: 670) |
| ETXM425 | ETXS850 (SEQ ID NO: 471) | ETXS849 (SEQ ID NO: 671) |
| ETXM426 | ETXS852 (SEQ ID NO: 472) | ETXS851 (SEQ ID NO: 672) |
| ETXM427 | ETXS854 (SEQ ID NO: 473) | ETXS853 (SEQ ID NO: 673) |
| ETXM428 | ETXS856 (SEQ ID NO: 474) | ETXS855 (SEQ ID NO: 674) |
| ETXM429 | ETXS858 (SEQ ID NO: 475) | ETXS857 (SEQ ID NO: 675) |
| ETXM430 | ETXS860 (SEQ ID NO: 476) | ETXS859 (SEQ ID NO: 676) |
| ETXM431 | ETXS862 (SEQ ID NO: 477) | ETXS861 (SEQ ID NO: 677) |
| ETXM432 | ETXS864 (SEQ ID NO: 478) | ETXS863 (SEQ ID NO: 678) |
| ETXM433 | ETXS866 (SEQ ID NO: 479) | ETXS865 (SEQ ID NO: 679) |
| ETXM434 | ETXS868 (SEQ ID NO: 480) | ETXS867 (SEQ ID NO: 680) |
| ETXM435 | ETXS870 (SEQ ID NO: 481) | ETXS869 (SEQ ID NO: 681) |
| ETXM436 | ETXS872 (SEQ ID NO: 482) | ETXS871 (SEQ ID NO: 682) |
| ETXM437 | ETXS874 (SEQ ID NO: 483) | ETXS873 (SEQ ID NO: 683) |
| ETXM438 | ETXS876 (SEQ ID NO: 484) | ETXS875 (SEQ ID NO: 684) |
| ETXM439 | ETXS878 (SEQ ID NO: 485) | ETXS877 (SEQ ID NO: 685) |
| ETXM440 | ETXS880 (SEQ ID NO: 486) | ETXS879 (SEQ ID NO: 686) |
| ETXM441 | ETXS882 (SEQ ID NO: 487) | ETXS881 (SEQ ID NO: 687) |
| ETXM442 | ETXS884 (SEQ ID NO: 488) | ETXS883 (SEQ ID NO: 688) |
| ETXM443 | ETXS886 (SEQ ID NO: 489) | ETXS885 (SEQ ID NO: 689) |
| ETXM444 | ETXS888 (SEQ ID NO: 490) | ETXS887 (SEQ ID NO: 690) |
| ETXM445 | ETXS890 (SEQ ID NO: 491) | ETXS889 (SEQ ID NO: 691) |
| ETXM446 | ETXS892 (SEQ ID NO: 492) | ETXS891 (SEQ ID NO: 692) |
| ETXM447 | ETXS894 (SEQ ID NO: 493) | ETXS893 (SEQ ID NO: 693) |
| ETXM448 | ETXS896 (SEQ ID NO: 494) | ETXS895 (SEQ ID NO: 694) |
| ETXM449 | ETXS898 (SEQ ID NO: 495) | ETXS897 (SEQ ID NO: 695) |
| ETXM450 | ETXS900 (SEQ ID NO: 496) | ETXS899 (SEQ ID NO: 696) |
| ETXM451 | ETXS902 (SEQ ID NO: 497) | ETXS901 (SEQ ID NO: 697) |
| ETXM452 | ETXS904 (SEQ ID NO: 498) | ETXS903 (SEQ ID NO: 698) |
| ETXM453 | ETXS906 (SEQ ID NO: 499) | ETXS905 (SEQ ID NO: 699) |
| ETXM454 | ETXS908 (SEQ ID NO: 500) | ETXS907 (SEQ ID NO: 700) |
| ETXM455 | ETXS910 (SEQ ID NO: 501) | ETXS909 (SEQ ID NO: 701) |
| ETXM456 | ETXS912 (SEQ ID NO: 502) | ETXS911 (SEQ ID NO: 702) |
| ETXM457 | ETXS914 (SEQ ID NO: 503) | ETXS913 (SEQ ID NO: 703) |
| ETXM458 | ETXS916 (SEQ ID NO: 504) | ETXS915 (SEQ ID NO: 704) |
| ETXM459 | ETXS918 (SEQ ID NO: 505) | ETXS917 (SEQ ID NO: 705) |
| ETXM460 | ETXS920 (SEQ ID NO: 506) | ETXS919 (SEQ ID NO: 706) |
| ETXM461 | ETXS922 (SEQ ID NO: 507) | ETXS921 (SEQ ID NO: 707) |
| ETXM462 | ETXS924 (SEQ ID NO: 508) | ETXS923 (SEQ ID NO: 708) |
| ETXM463 | ETXS926 (SEQ ID NO: 509) | ETXS925 (SEQ ID NO: 709) |
| ETXM464 | ETXS928 (SEQ ID NO: 510) | ETXS927 (SEQ ID NO: 710) |
| ETXM465 | ETXS930 (SEQ ID NO: 511) | ETXS929 (SEQ ID NO: 711) |
| ETXM466 | ETXS932 (SEQ ID NO: 512) | ETXS931 (SEQ ID NO: 712) |
| ETXM467 | ETXS934 (SEQ ID NO: 513) | ETXS933 (SEQ ID NO: 713) |
| ETXM468 | ETXS936 (SEQ ID NO: 514) | ETXS935 (SEQ ID NO: 714) |
| ETXM469 | ETXS938 (SEQ ID NO: 515) | ETXS937 (SEQ ID NO: 715) |
| ETXM470 | ETXS940 (SEQ ID NO: 516) | ETXS939 (SEQ ID NO: 716) |
| ETXM471 | ETXS942 (SEQ ID NO: 517) | ETXS941 (SEQ ID NO: 717) |
| ETXM472 | ETXS944 (SEQ ID NO: 518) | ETXS943 (SEQ ID NO: 718) |
| ETXM473 | ETXS946 (SEQ ID NO: 519) | ETXS945 (SEQ ID NO: 719) |
| ETXM474 | ETXS948 (SEQ ID NO: 520) | ETXS947 (SEQ ID NO: 720) |
| ETXM475 | ETXS950 (SEQ ID NO: 521) | ETXS949 (SEQ ID NO: 721) |
| ETXM476 | ETXS952 (SEQ ID NO: 522) | ETXS951 (SEQ ID NO: 722) |
| ETXM477 | ETXS954 (SEQ ID NO: 523) | ETXS953 (SEQ ID NO: 723) |
| ETXM478 | ETXS956 (SEQ ID NO: 524) | ETXS955 (SEQ ID NO: 724) |
| ETXM479 | ETXS958 (SEQ ID NO: 525) | ETXS957 (SEQ ID NO: 725) |
| ETXM480 | ETXS960 (SEQ ID NO: 526) | ETXS959 (SEQ ID NO: 726) |
| ETXM481 | ETXS962 (SEQ ID NO: 527) | ETXS961 (SEQ ID NO: 727) |
| ETXM482 | ETXS964 (SEQ ID NO: 528) | ETXS963 (SEQ ID NO: 728) |
| ETXM483 | ETXS966 (SEQ ID NO: 529) | ETXS965 (SEQ ID NO: 729) |
| ETXM484 | ETXS968 (SEQ ID NO: 530) | ETXS967 (SEQ ID NO: 730) |
| ETXM485 | ETXS970 (SEQ ID NO: 531) | ETXS969 (SEQ ID NO: 731) |
| ETXM486 | ETXS972 (SEQ ID NO: 532) | ETXS971 (SEQ ID NO: 732) |
| ETXM487 | ETXS974 (SEQ ID NO: 533) | ETXS973 (SEQ ID NO: 733) |
| ETXM488 | ETXS976 (SEQ ID NO: 534) | ETXS975 (SEQ ID NO: 734) |
| ETXM489 | ETXS978 (SEQ ID NO: 535) | ETXS977 (SEQ ID NO: 735) |
| ETXM490 | ETXS980 (SEQ ID NO: 536) | ETXS979 (SEQ ID NO: 736) |
| ETXM491 | ETXS982 (SEQ ID NO: 537) | ETXS981 (SEQ ID NO: 737) |
| ETXM492 | ETXS984 (SEQ ID NO: 538) | ETXS983 (SEQ ID NO: 738) |
| ETXM493 | ETXS986 (SEQ ID NO: 539) | ETXS985 (SEQ ID NO: 739) |
| ETXM494 | ETXS988 (SEQ ID NO: 540) | ETXS987 (SEQ ID NO: 740) |
| ETXM495 | ETXS990 (SEQ ID NO: 541) | ETXS989 (SEQ ID NO: 741) |
| ETXM496 | ETXS992 (SEQ ID NO: 542) | ETXS991 (SEQ ID NO: 742) |
| ETXM497 | ETXS994 (SEQ ID NO: 543) | ETXS993 (SEQ ID NO: 743) |
| ETXM498 | ETXS996 (SEQ ID NO: 544) | ETXS995 (SEQ ID NO: 744) |
| ETXM499 | ETXS998 (SEQ ID NO: 545) | ETXS997 (SEQ ID NO: 745) |
| ETXM500 | ETXS1000 (SEQ ID NO: 546) | ETXS999 (SEQ ID NO: 746) |
| ETXM501 | ETXS1002 (SEQ ID NO: 547) | ETXS1001 (SEQ ID NO: 747) |
| ETXM502 | ETXS1004 (SEQ ID NO: 548) | ETXS1003 (SEQ ID NO: 748) |
| ETXM503 | ETXS1006 (SEQ ID NO: 549) | ETXS1005 (SEQ ID NO: 749) |
| ETXM504 | ETXS1008 (SEQ ID NO: 550) | ETXS1007 (SEQ ID NO: 750) |
| ETXM505 | ETXS1010 (SEQ ID NO: 551) | ETXS1009 (SEQ ID NO: 751) |
| ETXM506 | ETXS1012 (SEQ ID NO: 552) | ETXS1011 (SEQ ID NO: 752) |
| ETXM507 | ETXS1014 (SEQ ID NO: 553) | ETXS1013 (SEQ ID NO: 753) |
| ETXM508 | ETXS1016 (SEQ ID NO: 554) | ETXS1015 (SEQ ID NO: 754) |
| ETXM509 | ETXS1018(SEQ ID NO: 555) | ETXS1017 (SEQ ID NO: 755) |
| ETXM510 | ETXS1020 (SEQ ID NO: 556) | ETXS1019 (SEQ ID NO: 756) |
| ETXM511 | ETXS1022 (SEQ ID NO: 557) | ETXS1021 (SEQ ID NO: 757) |
| ETXM512 | ETXS1024 (SEQ ID NO: 558) | ETXS1023 (SEQ ID NO: 758) |
| ETXM513 | ETXS1026 (SEQ ID NO: 559) | ETXS1025 (SEQ ID NO: 759) |
| ETXM514 | ETXS1028 (SEQ ID NO: 560) | ETXS1027 (SEQ ID NO: 760) |
| ETXM515 | ETXS1030 (SEQ ID NO: 561) | ETXS1029 (SEQ ID NO: 761) |
| ETXM1064 | ETXS2128 (SEQ ID NO: 795) | ETXS2127 (SEQ ID NO: 798) |
| ETXM1072 | ETXS2144 (SEQ ID NO: 796) | ETXS2143 (SEQ ID NO: 799) |
| ETXM1076 | ETXS2152 (SEQ ID NO: 797) | ETXS2151 (SEQ ID NO: 800) |
| ETXM1180 | ETXS1032 (SEQ ID NO: 762) | ETXS1031 (SEQ ID NO: 772) |
| ETXM1181 | ETXS1034 (SEQ ID NO: 763) | ETXS1033 (SEQ ID NO: 773) |
| ETXM1184 | ETXS1036 (SEQ ID NO: 764) | ETXS1035 (SEQ ID NO: 774) |
| ETXM1185 | ETXS1038 (SEQ ID NO: 765) | ETXS1037 (SEQ ID NO: 775) |
| ETXM1157 | ETXS1040 (SEQ ID NO: 766) | ETXS1039 (SEQ ID NO: 776) |
| ETXM1162 | ETXS1042 (SEQ ID NO: 767) | ETXS1041 (SEQ ID NO: 777) |
| ETXM1188 | ETXS1044 (SEQ ID NO: 768) | ETXS1043 (SEQ ID NO: 778) |
| ETXM1189 | ETXS1046 (SEQ ID NO: 769) | ETXS1045 (SEQ ID NO: 779) |
| ETXM1192 | ETXS1048 (SEQ ID NO: 770) | ETXS1047 (SEQ ID NO: 780) |
| ETXM1193 | ETXS1050 (SEQ ID NO: 771) | ETXS1049 (SEQ ID NO: 781) |
| ETXM1194 | ETXS1051 (SEQ ID NO: 782) | ETXS1033 (SEQ ID NO: 773) |
| ETXM1195 | ETXS1052 (SEQ ID NO: 783) | ETXS1037 (SEQ ID NO: 775) |
| ETXM1196 | ETXS1053 (SEQ ID NO: 784) | ETXS1041 (SEQ ID NO: 777) |
| ETXM1197 | ETXS1054 (SEQ ID NO: 785) | ETXS1045 (SEQ ID NO: 779) |
| ETXM1198 | ETXS1055 (SEQ ID NO: 786) | ETXS1049 (SEQ ID NO: 781) |

[0212] In a particularly preferred embodiment, the invention relates to a nucleic acid comprising first and second strands that comprise, consist of, or consist essentially of a nucleoside sequence differing by 0 or 1 nucleosides from any one of the following first and second sequences:

| Duplex ID | Modified first strand | Modified second strand |
|---|---|---|
| ETXM342 | SEQ ID NO: 388 | SEQ ID NO: 588 |
| ETXM339 | SEQ ID NO: 385 | SEQ ID NO: 585 |
| ETXM338 | SEQ ID NO: 384 | SEQ ID NO: 584 |
| ETXM359 | SEQ ID NO: 405 | SEQ ID NO: 605 |
| ETXM396 | SEQ ID NO: 442 | SEQ ID NO: 642 |

[0213] In an even more preferred embodiment, the invention relates to a nucleic acid comprising first and second strands that comprise, consist of, or consist essentially of a nucleoside sequence differing by 0 or 1 nucleosides from any one of the following first and second sequences:

| Duplex ID | Modified first strand | Modified second strand |
|---|---|---|
| ETXM1180 | SEQ ID NO: 762 | SEQ ID NO: 772 |
| ETXM1181 | SEQ ID NO: 763 | SEQ ID NO: 773 |
| ETXM1184 | SEQ ID NO: 764 | SEQ ID NO: 774 |
| ETXM1185 | SEQ ID NO: 765 | SEQ ID NO: 775 |
| ETXM1157 | SEQ ID NO: 766 | SEQ ID NO: 776 |
| ETXM1162 | SEQ ID NO: 767 | SEQ ID NO: 777 |
| ETXM1188 | SEQ ID NO: 768 | SEQ ID NO: 778 |
| ETXM1189 | SEQ ID NO: 769 | SEQ ID NO: 779 |
| ETXM1192 | SEQ ID NO: 770 | SEQ ID NO: 780 |
| ETXM1193 | SEQ ID NO: 771 | SEQ ID NO: 781 |
| ETXM1194 | SEQ ID NO: 782 | SEQ ID NO: 773 |
| ETXM1195 | SEQ ID NO: 783 | SEQ ID NO: 775 |
| ETXM1196 | SEQ ID NO: 784 | SEQ ID NO: 777 |
| ETXM1197 | SEQ ID NO: 785 | SEQ ID NO: 779 |
| ETXM1198 | SEQ ID NO: 786 | SEQ ID NO: 781 |

[0214] In case of ambiguity between the sequences in this specification and the sequences in the attached sequence listing, the sequences provided herein are considered to be the correct sequences.

### Abasic Nucleotides

[0215] In certain embodiments, there are 1, e.g. 2, e.g. 3, e.g. 4 or more abasic nucleosides present in nucleic acids according to the invention. Abasic nucleosides are modified nucleosides because they lack the base normally seen at position 1 of the sugar moiety. Typically, there will be a hydrogen at position 1 of the sugar moiety of the abasic nucleosides present in a nucleic acid according to the present invention.

[0216] The abasic nucleosides are in the terminal region of the second strand, preferably located within the terminal 5 nucleosides of the end of the strand. The terminal region may be the terminal 5 nucleosides, which includes abasic nucleosides.

[0217] The second strand may comprise, as preferred features (which are all specifically contemplated in combination unless mutually exclusive):
[0218] 2, or more than 2, abasic nucleosides in a terminal region of the second strand; and/or
[0219] 2, or more than 2, abasic nucleosides in either the 5′ or 3′ terminal region of the second strand; and/or
[0220] 2, or more than 2, abasic nucleosides in either the 5′ or 3′ terminal region of the second strand, wherein the abasic nucleosides are present in an overhang as herein described; and/or
[0221] 2, or more than 2, consecutive abasic nucleosides in a terminal region of the second strand, wherein preferably one such abasic nucleosides is a terminal nucleosides; and/or
[0222] 2, or more than 2, consecutive abasic nucleosides in either the 5′ or 3′ terminal region of the second strand, wherein preferably one such abasic nucleosides is a terminal nucleosides in either the 5′ or 3′ terminal region of the second strand; and/or
[0223] a reversed internucleoside linkage connects at least one abasic nucleoside to an adjacent basic nucleoside in a terminal region of the second strand; and/or
[0224] a reversed internucleoside linkage connects at least one abasic nucleoside to an adjacent basic nucleoside in either the 5′ or 3′ terminal region of the second strand; and/or
[0225] an abasic nucleoside as the penultimate nucleoside which is connected via the reversed linkage to the nucleoside which is not the terminal nucleoside (called the antepenultimate nucleoside herein); and/or
[0226] abasic nucleosides as the 2 terminal nucleosides connected via a 5′-3′ linkage when reading the strand in the direction towards the terminus comprising the terminal nucleosides;
[0227] abasic nucleosides as the 2 terminal nucleosides connected via a 3′-5′ linkage when reading the strand in the direction towards the terminus comprising the terminal nucleosides;
[0228] abasic nucleosides as the terminal 2 positions, wherein the penultimate nucleoside is connected via the reversed linkage to the antepenultimate nucleoside, and wherein the reversed linkage is a 5-5′ reversed linkage or a 3′-3′ reversed linkage;
[0229] abasic nucleosides as the terminal 2 positions, wherein the penultimate nucleoside is connected via the reversed linkage to the antepenultimate nucleoside, and wherein either
[0230] (1) the reversed linkage is a 5-5′ reversed linkage and the linkage between the terminal and penultimate abasic nucleosides is 3′5′ when reading towards the terminus comprising the terminal and penultimate abasic nucleosides; or
[0231] (2) the reversed linkage is a 3-3′ reversed linkage and the linkage between the terminal and penultimate abasic nucleosides is 5′3′ when reading towards the terminus comprising the terminal and penultimate abasic nucleosides.

[0232] Preferably there is an abasic nucleoside at the terminus of the second strand.

[0233] Preferably there are 2 or at least 2 abasic nucleosides in the terminal region of the second strand, preferably at the terminal and penultimate positions.

[0234] Preferably 2 or more abasic nucleosides are consecutive, for example all abasic nucleosides may be consecutive. For example, the terminal 1 or terminal 2 or terminal 3 or terminal 4 nucleotides may be abasic nucleosides.

[0235] An abasic nucleoside may also be linked to an adjacent nucleoside through a 5′-3′ phosphodiester linkage or reversed linkage unless there is only 1 abasic nucleoside at the terminus, in which case it will have a reversed linkage to the adjacent nucleoside.

[0236] A reversed linkage (which may also be referred to as an inverted linkage, which is also seen in the art), comprises either a 5′-5′, a 3-′3′, a 3′-2′ or a 2′-3′ phosphodiester linkage between the adjacent sugar moieties of the nucleosides.

[0237] Abasic nucleosides which are not terminal will have 2 phosphodiester bonds, one with each adjacent nucleoside, and these may be a reversed linkage or may be a 5′-3 phosphodiester bond or may be one of each.

[0238] A preferred embodiment comprises 2 abasic nucleosides at the terminal and penultimate positions of the second strand, and wherein the reversed internucleoside linkage is located between the penultimate (abasic) nucleoside and the antepenultimate nucleoside.

[0239] Preferably there are 2 abasic nucleosides at the terminal and penultimate positions of the second strand and the penultimate nucleoside is linked to the antepenultimate nucleoside through a reversed internucleoside linkage and is linked to the terminal nucleoside through a 5′-3′ or 3′-5′ phosphodiester linkage (reading in the direction of the terminus of the molecule).

[0240] Different preferred features are as follows:

[0241] The reversed internucleoside linkage is a 3′-3′ reversed linkage. The reversed internucleoside linkage is at a terminal region which is distal to the 5′ terminal phosphate of the second strand.

[0242] The reversed internucleoside linkage is a 5′-5′ reversed linkage. The reversed internucleoside linkage is at a terminal region which is distal to the 3′ terminal hydroxide of the second strand.

[0243] In certain embodiments, the second strand comprises 2 consecutive abasic nucleosides in the 5′ terminal region of the second strand, wherein one such abasic nucleoside is a terminal nucleoside at the 5′ terminal region of the second strand and the other abasic nucleoside is a penultimate nucleoside at the 5′ terminal region of the second strand, wherein: (a) said penultimate abasic nucleoside is connected to an adjacent first basic nucleoside in an adjacent 5′ near terminal region through a reversed internucleoside linkage; and (b) the reversed linkage is a 5-5′ reversed linkage; and (c) the linkage between the terminal and penultimate abasic nucleosides is 3′5′ when reading towards the terminus comprising the terminal and penultimate abasic nucleosides. More typically, (i) the first strand and the second strand each has a length of 23 nucleosides; (ii) two phosphorothioate internucleoside linkages are respectively between three consecutive positions in said 5′ near terminal region of the second strand, wherein a first phosphorothioate internucleoside linkage is present between said adjacent first basic nucleoside of (a) and an adjacent second basic nucleoside in said 5′ near terminal region of the second strand, and a second phosphorothioate internucleoside linkage is present between said adjacent second basic nucleoside and an adjacent third basic nucleoside in said 5′ near terminal region of the second strand; (iii) two phosphorothioate internucleoside linkages are respectively between three consecutive positions in both 5′ and 3′ terminal regions of the first strand, whereby a terminal nucleoside respectively at each of the 5′ and 3′ terminal regions of said first strand is each attached to a respective 5′ and 3′ adjacent penultimate nucleoside by a phosphorothioate internucleoside linkage, and each first 5′ and 3′ penultimate nucleoside is attached to a respective 5′ and 3′ adjacent antepenultimate nucleoside by a phosphorothioate internucleoside linkage; and (iv) the second strand of the nucleic acid is conjugated directly or indirectly to one or more ligand moieties at the 3′ terminal region of the second strand.

[0244] Alternatively the second strand comprises 2 consecutive abasic nucleosides preferably in an overhang in the 3′ terminal region of the second strand, wherein one such abasic nucleoside is a terminal nucleoside at the 3′ terminal region of the second strand and the other abasic nucleoside is a penultimate nucleoside at the 3′ terminal region of the second strand, wherein: (a) said penultimate abasic nucleoside is connected to an adjacent first basic nucleoside in an adjacent 3′ near terminal region through a reversed internucleoside linkage; and (b) the reversed linkage is a 3-3′ reversed linkage; and (c) the linkage between the terminal and penultimate abasic nucleosides is 5′-3′ when reading towards the terminus comprising the terminal and penultimate abasic nucleosides. More typically, (i) the first strand and the second strand each has a length of 23 nucleosides; (ii) two phosphorothioate internucleoside linkages are respectively between three consecutive positions in said 3′ near terminal region of the second strand, wherein a first phosphorothioate internucleoside linkage is present between said adjacent first basic nucleoside of (a) and an adjacent second basic nucleoside in said 3′ near terminal region of the second strand, and a second phosphorothioate internucleoside linkage is present between said adjacent second basic nucleoside and an adjacent third basic nucleoside in said 3′ near terminal region of the second strand; (iii) two phosphorothioate internucleoside linkages are respectively between three consecutive positions in both 5′ and 3′ terminal regions of the first strand, whereby a terminal nucleoside respectively at each of the 5′ and 3′ terminal regions of said first strand is each attached to a respective 5′ and 3′ adjacent penultimate nucleoside by a phosphorothioate internucleoside linkage, and each first 5′ and 3′ penultimate nucleoside is attached to a respective 5′ and 3′ adjacent antepenultimate nucleoside by a phosphorothioate internucleoside linkage; and (iv) the second strand of the nucleic acid is conjugated directly or indirectly to one or more ligand moieties at the 5′ terminal region of the second strand.

[0245] Examples of the structures are as follows (where the specific RNA nucleosides shown are not limiting and could be any RNA nucleoside):
[0246] A A 3′-3′ reversed bond (and also showing the 5′-3 direction of the last phosphodiester bond between the two abasic molecules reading towards the terminus of the molecule)

[chemical structure]

[0247] B Illustrating a 5′-5′ reversed bond (and also showing the 3′-5′ direction of the last phosphodiester bond between the two abasic molecules reading towards the terminus of the molecule)

[chemical structure]

[0248] The abasic nucleoside or abasic nucleosides present in the nucleic acid are provided in the presence of a reversed internucleoside linkage or linkages, namely a 5′-5′ or a 3′-3′ reversed internucleoside linkage. A reversed linkage occurs as a result of a change of orientation of an adjacent nucleoside sugar, such that the sugar will have a 3′-5′ orientation as opposed to the conventional 5′-3′ orientation (with reference to the numbering of ring atoms on the nucleoside sugars). The abasic nucleoside or nucleosides as present in the nucleic acids of the invention preferably include such inverted nucleoside sugars.

[0249] In the case of a terminal nucleoside having an inverted orientation, then this will result in an “inverted” end configuration for the overall nucleic acid. Whilst certain structures drawn and referenced herein are represented using conventional 5′-3′ direction (with reference to the numbering of ring atoms on the nucleoside sugars), it will be appreciated that the presence of a terminal nucleoside having a change of orientation and a proximal 3′-3′ reversed linkage, will result in a nucleic acid having an overall 5′-5′ end structure (i.e. the conventional 3′ end nucleoside becomes a 5′ end nucleoside). Alternatively, it will be appreciated that the presence of a terminal nucleoside having a change of orientation and a proximal 5′-5′ reversed linkage will result in a nucleic acid with an overall 3′-3′ end structure.

[0250] The proximal 3′-3′ or 5′-5′ reversed linkage as herein described, may comprise the reversed linkage being directly adjacent/attached to a terminal nucleoside having an inverted orientation, such as a single terminal nucleoside having an inverted orientation. Alternatively, the proximal 3′-3′ or 5′-5′ reversed linkage as herein described, may comprise the reversed linkage being adjacent 2, or more than 2, nucleosides having an inverted orientation, such as 2, or more than 2, terminal region nucleosides having an inverted orientation, such as the terminal and penultimate nucleosides. In this way, the reversed linkage may be attached to a penultimate nucleoside having an inverted orientation. While a skilled addressee will appreciate that inverted orientations as described above can result in nucleic acid molecules having overall 3′-3′ or 5′-5′ end structures as described herein, it will also be appreciated that with the presence of one or more additional reversed linkages and/or nucleosides having an inverted orientation, then the overall nucleic acid may have 3′-5′ end structures corresponding to the conventionally positioned 5′/3′ ends.

[0251] In one aspect the nucleic acid may have a 3′-3′ reversed linkage, and the terminal sugar moiety may comprise a 5′ OH rather than a 5′ phosphate group at the 5′ position of that terminal sugar.

[0252] A skilled person would therefore clearly understand that 5′-5′, 3′-3′ and 3′-5′ (reading in the direction of that terminus) end variants of the more conventional 5′-3′ structures (with reference to the numbering of ring atoms on the end nucleoside sugars) drawn herein are included in the scope of the disclosure, where a reversed linkage or linkages is/are present.

[0253] In the situation of e.g. a reversed internucleoside linkage and/or one or more nucleosides having an inverted orientation creating an inverted end, and where the relative position of a linkage (e.g. to a linker) or the location of an internal feature (such as a modified nucleoside) is defined relative to the 5′ or 3′ end of the nucleic acid, then the 5′ or 3′ end is the conventional 5′ or 3′ end which would have existed had a reversed linkage not been in place, and wherein the conventional 5′ or 3′ end is determined by consideration of the directionality of the majority of the internal nucleoside linkages and/or nucleoside orientation within the nucleic acid. It is possible to tell from these internal bonds and/or nucleoside orientation which ends of the nucleic acid would constitute the conventional 5′ and 3′ ends (with reference to the numbering of ring atoms on the end nucleoside sugars) of the molecule absent the reversed linkage.

[0254] For example, in the structure shown below there are abasic residues in the first 2 positions located at the “5′” end. Where the terminal nucleoside has an inverted orientation then the “5′” end indicated in the diagram below, which is the conventional 5′ end, can in fact comprise a 3′ OH in view of the inverted nucleoside at the terminal position. Nevertheless the majority of the molecule will comprise conventional internucleoside linkages that run from the 3′ OH of the sugar to the 5′ phosphate of the next sugar, when reading in the standard 5′ [PO4] to 3′ [OH] direction of a nucleic acid molecule (with reference to the numbering of ring atoms on the nucleoside sugars), which can be used to determine the conventional 5′ and 3′ ends that would be found absent the inverted end configuration.

[0255] A 5′ A-A-Me-Me-Me-Me-Me-Me-F-Me-F—F—F-Me-Me-Me-Me-Me-Me-Me-Me-Me-Me 3′

[0256] The reversed bond is preferably located at the end of the nucleic acid e.g. RNA which is distal to a ligand moiety, such as a GalNAc containing portion, of the molecule.

[0257] GalNAc-siRNA constructs with a 5′-GalNAc on the sense strand can have a reversed linkage on the opposite end of the sense strand.

[0258] GalNAc-siRNA constructs with a 3′-GalNAc on the sense strand can have a reversed linkage on the opposite end of the sense strand.

### Nucleic Acid Lengths

[0259] In one aspect the i) the first strand of the nucleic acid has a length in the range of 17 to 30 nucleosides, preferably 19 to 25 nucleosides, more preferably 19 or 23 nucleosides; and/or ii) the second strand of the nucleic acid has a length in the range of 17 to 30 nucleosides, preferably 19 to 25 nucleosides, more preferably 19 or 21 nucleosides.

[0260] Typically, the duplex region of the nucleic acid is between 17 and 30 nucleosides in length, more preferably is 19 or 21 nucleosides in length. Similarly, the region of complementarity between the first strand and the portion of RNA transcribed from the ZPI gene is between 17 and 30 nucleosides in length. Generally, the duplex structure of the nucleic acid e.g. an iRNA is about 15 to 30 base pairs in length, e.g., 15-29, 15-28, 15-27, 15-26, 15-25, 15-24, 15-23, 15-22, 15-21, 15-20, 15-19, 15-18, 15-17, 18-30, 18-29, 18-28, 18-27, 18-26, 18-25, 18-24, 18-23, 18-22, 18-21, 18-20, 19-30, 19-29, 19-28, 19-27, 19-26, 19-25, 19-24, 19-23, 19-22, 19-21, 19-20, 20-30, 20-29, 20-28, 20-27, 20-26, 20-25, 20-24,20-23, 20-22, 20-21, 21-30, 21-29, 21-28, 21-27, 21-26, 21-25, 21-24, 21-23, or 21-22 base pairs in length. Ranges and lengths intermediate to the above recited ranges and lengths are also contemplated to be part of the invention.

[0261] Similarly, the region of complementarity of an antisense sequence to a target sequence and/or the region of complementarity of an antisense sequence to a sense sequence is about 15 to 30 nucleosides in length, e.g., 15-29, 15-28, 15-27, 15-26, 15-25, 15-24, 15-23, 15-22, 15-21, 15-20, 15-19, 15-18, 15-17, 18-30, 18-29, 18-28, 18-27, 18-26, 18-25, 18-24, 18-23, 18-22, 18-21, 18-20, 19-30, 19-29, 19-28, 19-27, 19-26, 19-25, 19-24, 19-23, 19-22, 19-21, 19-20, 20-30, 20-29, 20-28, 20-27, 20-26, 20-25, 20-24,20-23, 20-22, 20-21, 21-30, 21-29, 21-28, 21-27, 21-26, 21-25, 21-24, 21-23, or 21-22 nucleosides in length. Ranges and lengths intermediate to the above recited ranges and lengths are also contemplated to be part of the invention.

[0262] In certain preferred embodiments, the region of complementarity of an antisense sequence to a target sequence and/or the region of complementarity of an antisense sequence to a sense sequence is at least 17 nucleosides in length. For example, the region of complementarity between the antisense strand and the target is 19 to 21 nucleosides in length, for example, the region of complementarity is 21 nucleosides in length.

[0263] In preferred embodiments, each strand is no more than 30 nucleosides in length.

[0264] In certain preferred embodiments, the duplex structure of the nucleic acid e.g. an siRNA is 19 or 21 base pairs in length. In particularly preferred embodiment, the duplex may have one of the following structures:
[0265] e.g., ETXM316-ETXM415, ETXM436-ETXM515 and ETXM1064-ETXM1198:

[chemical structure]

[0266] e.g., ETXM416-ETXM435:

[chemical structure]

[0267] A nucleic acid e.g. a dsRNA as described herein can further include one or more single-stranded nucleoside overhangs e.g., 1-4, 2-4, 1-3, 2-3, 1, 2, 3, or 4 nucleosides. A nucleoside overhang can comprise or consist of a nucleoside/nucleoside analog, including a deoxynucleoside/nucleoside. The overhang(s) can be on the sense strand, the antisense strand, or any combination thereof. Furthermore, the nucleoside(s) of an overhang can be present on the 5′-end, 3′-end, or both ends of an antisense or sense strand of a nucleic acid e.g. a dsRNA.

[0268] In certain preferred embodiments, at least one strand comprises a 3′ overhang of at least 1 nucleoside, e.g., at least one strand comprises a 3′ overhang of at least 2 nucleosides. The overhang is suitably on the antisense/guide strand and/or the sense/passenger strand.

### Nucleic Acid Modifications

[0269] In certain embodiments, the nucleic acid e.g. an RNA of the invention e.g., a dsiRNA, does not comprise further modifications, e.g., chemical modifications or conjugations known in the art and described herein.

[0270] In other preferred embodiments, the nucleic acid e.g. RNA of the invention, e.g., a dsiRNA, is further chemically modified to enhance stability or other beneficial characteristics.

[0271] In certain embodiments of the invention, substantially all of the nucleosides are modified.

[0272] The nucleic acids featured in the invention can be synthesized or modified by methods well established in the art, such as those described in “Current protocols in nucleic acid chemistry,” Beaucage, S. L. et al. (Edrs.), John Wiley & Sons, Inc., New York, NY, USA, which is hereby incorporated herein by reference.

[0273] Modifications include, for example, end modifications, e.g., 5′-end modifications (phosphorylation, conjugation, inverted linkages) or 3′-end modifications (conjugation, DNA nucleosides within an RNA, or RNA nucleosides within a DNA, inverted linkages, etc.); base modifications, e.g., replacement with stabilizing bases, destabilizing bases, or bases that base pair with an expanded repertoire of partners, conjugated bases; sugar modifications (e.g., at the 2′-position or 4′-position) or replacement of the sugar; or backbone modifications, including modification or replacement of the phosphodiester linkages.

[0274] Specific examples of nucleic acids such as siRNA compounds useful in the embodiments described herein include, but are not limited to RNAs containing modified backbones or no natural internucleoside linkages. Nucleic acids such as RNAs having modified backbones include, among others, those that do not have a phosphorus atom in the backbone. For the purposes of this specification, and as sometimes referenced in the art, modified nucleic acids e.g. RNAs that do not have a phosphorus atom in their internucleoside backbone can also be considered to be oligonucleosides. In some embodiments, a modified nucleic acid e.g. an siRNA will have a phosphorus atom in its internucleoside backbone.

[0275] Modified nucleic acid e.g. RNA backbones include, for example, phosphorothioates, chiral phosphorothioates, phosphorodithioates, phosphotriesters, aminoalkylphosphotriesters, methyl and other alkyl phosphonates including 3′-alkylene phosphonates and chiral phosphonates, phosphinates, phosphoramidates including 3′-amino phosphoramidate and aminoalkylphosphoramidates, thionophosphoramidates, thionoalkylphosphonates, thionoalkylphosphotriesters, and boranophosphates having normal 3′-5′ linkages, 2′-5′-linked analogs of these, and those having inverted polarity wherein the adjacent pairs of nucleoside units are linked 5′-3′ or 5-2′. Various salts, mixed salts and free acid forms are also included.

[0276] Modified nucleic acids e.g. RNAs can also contain one or more substituted sugar moieties. The nucleic acids e.g. siRNAs, e.g., dsiRNAs, featured herein can include one of the following at the 2′-position: OH; F; O—, S—, or N-alkyl; O—, S—, or N-alkenyl; O-, S- or N-alkynyl; or O-alkyl-O-alkyl, wherein the alkyl, alkenyl and alkynyl can be substituted or unsubstituted. 2′ O-methyl and 2′-F are preferred modifications.

[0277] In certain preferred embodiments, the nucleic acid comprises at least one modified nucleoside.

[0278] The nucleic acid of the invention may comprise one or more modified nucleosides on the first strand and/or the second strand.

[0279] In some embodiments, substantially all of the nucleosides of the sense strand and all of the nucleosides of the antisense strand comprise a modification.

[0280] In some embodiments, all of the nucleosides of the sense strand and substantially all of the nucleosides of the antisense strand comprise a modification.

[0281] In some embodiments, all of the nucleosides of the sense strand and all of the nucleosides of the antisense strand comprise a modification.

[0282] In one embodiment, at least one of the modified nucleosides is selected from the group consisting of a deoxy-nucleoside, a 3′-terminal deoxy-thymine (dT) nucleoside, a 2′-O-methyl modified nucleoside (also called herein 2′-Me, where Me is a methoxy), a 2′-fluoro modified nucleoside, a 2′-deoxy-modified nucleoside, a locked nucleoside, an unlocked nucleoside, a conformationally restricted nucleoside, a constrained ethyl nucleoside, an abasic nucleoside, a 2′-amino-modified nucleoside, a 2′-O-allyl-modified nucleoside, 2′-C-alkyl-modified nucleoside, 2′-hydroxly-modified nucleoside, a 2′-methoxyethyl modified nucleoside, a 2′-O-alkyl-modified nucleoside, a morpholino nucleoside, a phosphoramidate, a non-natural base comprising nucleoside, a tetrahydropyran modified nucleoside, a 1,5-anhydrohexitol modified nucleoside, a cyclohexenyl modified nucleoside, a nucleoside comprising a phosphorothioate group, a nucleoside comprising a methylphosphonate group, a nucleoside comprising a 5′-phosphate, and a nucleoside comprising a 5′-phosphate mimic. In another embodiment, the modified nucleosides comprise a short sequence of 3′-terminal deoxy-thymine nucleosides (dT).

[0283] Modifications on the nucleosides may preferably be selected from the group including, but not limited to, LNA, HNA, CeNA, 2-methoxyethyl, 2′-O-alkyl, 2-O-allyl, 2′-C-allyl, 2′-fluoro, 2′-deoxy, 2′-hydroxyl, and combinations thereof. In another embodiment, the modifications on the nucleosides are 2-O-methyl (“2-Me”) or 2′-fluoro modifications.

[0284] One preferred modification is a modification at the 2′-OH group of the ribose sugar, optionally selected from 2′-Me or 2′-F modifications.

[0285] Preferred nucleic acid comprise one or more nucleosides on the first strand and/or the second strand which are modified, to form modified nucleosides, as follows:

[0286] A nucleic acid wherein the modification is a modification at the 2′-OH group of the ribose sugar, optionally selected from 2′-Me or 2′-F modifications.

[0287] A nucleic acid wherein the first strand comprises a 2′-F modification at any of position 2, position 6, position 14, or any combination thereof, counting from position 1 of said first strand.

[0288] A nucleic acid wherein the second strand comprises a 2′-F modification at any of position 7, position 9, position 11, or any combination thereof, counting from position 1 of said second strand.

[0289] A nucleic acid wherein the second strand comprises a 2′-F modification at position 7 and/or 9, and/or 11, and/or 13, counting from position 1 of said second strand.

[0290] A nucleic acid wherein the second strand comprises a 2′-F modification at position 7 and 9 and 11 counting from position 1 of said second strand.

[0291] A nucleic acid wherein the first and second strand each comprise 2′-Me and 2′-F modifications.

[0292] A nucleic which comprises at least one thermally destabilizing modification, suitably at one or more of positions 1 to 9 of the first strand counting from position 1 of the first strand, and/or at one or more of positions on the second strand aligned with positions 1 to 9 of the first strand, wherein the destabilizing modification is selected from a modified unlocked nucleic acid (UNA) and a glycol nucleic acid (GNA), preferably a glycol nucleic acid. A nucleic acid wherein the nucleic acid comprises 3 or more 2′-F modifications at positions 7 to 13 of the second strand, such as 4, 5, 6 or 7 2′-F modifications at positions 7 to 13 of the second strand, counting from position 1 of said second strand.

[0293] A nucleic acid wherein said second strand comprises at least 3, such as 4, 5 or 6, 2′-Me modifications at positions 1 to 6 of the second strand, counting from position 1 of said second strand.

[0294] A nucleic acid wherein said first strand comprises at least 5 2′-Me consecutive modifications at the 3′ terminal region, preferably including the terminal nucleoside at the 3′ terminal region, or at least within 1 or 2 nucleosides from the terminal nucleoside at the 3′ terminal region.

[0295] A nucleic acid wherein said first strand comprises 7 2′-Me consecutive modifications at the 3′ terminal region, preferably including the terminal nucleoside at the 3′ terminal region.

[0296] A nucleic acid which comprises at least one thermally destabilizing modification at position 7 of the first strand, counting from position 1 of the first strand.

[0297] A nucleic acid which is an siRNA oligonucleoside, wherein the siRNA oligonucleoside comprises at least 3 2′-F modifications at positions 6 to 12 of the second strand, counting from position 1 of said second strand.

[0298] A nucleic acid which is an siRNA oligonucleoside, wherein said second strand comprises at least 3 2′-Me modifications at positions 1 to 6 of the second strand, counting from position 1 of said second strand.

[0299] A nucleic acid which is an siRNA oligonucleoside, wherein each of the first and second strands comprises an alternating modification pattern, preferably a fully alternating modification pattern along the entire length of each of the first and second strands, wherein the nucleosides of the first strand are modified by (i) 2′Me modifications on the odd numbered nucleosides counting from position 1 of the first strand, and (ii) 2′F modifications on the even numbered nucleosides counting from position 1 of the first strand, and nucleosides of the second strand are modified by (i) 2′F modifications on the odd numbered nucleosides counting from position 1 of the second strand, and (ii) 2′Me modifications on the even numbered nucleosides counting from position 1 of the second strand. Typically, such fully alternating modification patterns are present in a blunt ended oligonucleoside, wherein each of the first and second strands are 19 or 23 nucleosides in length.

[0300] Position 1 of the first or the second strand is the nucleoside which is the closest to the end of the nucleic acid (ignoring any abasic nucleosides) and that is joined to an adjacent nucleoside (at Position 2) via a 3′ to 5′ internal bond, with reference to the bonds between the sugar moieties of the backbone, and reading in a direction away from that end of the molecule.

[0301] It can therefore be seen that “position 1 of the sense strand” is the 5′ most nucleoside (not including abasic nucleosides) at the conventional 5′ end of the sense strand. Typically, the nucleoside at this position 1 of the sense strand will be equivalent to the 5′ nucleoside of the selected target nucleic acid sequence, and more generally the sense strand will have equivalent nucleosides to those of the target nucleic acid sequence starting from this position 1 of the sense strand, whilst also allowing for acceptable mismatches between the sequences.

[0302] As used herein, “position 1 of the antisense strand” is the 5′ most nucleoside (not including abasic nucleosides) at the conventional 5′ end of the antisense strand. As hereinbefore described, there will be a region of complementarity between the sense and antisense strands, and in this way the antisense strand will also have a region of complementarity to the target nucleic acid sequence as referred to above.

[0303] In certain embodiments, the nucleic acid e.g. RNAi agent further comprises at least one phosphorothioate or methylphosphonate internucleoside linkage. For example the phosphorothioate or methylphosphonate internucleoside linkage can be at the 3′-terminus or in the terminal region of one strand, i.e., the sense strand or the antisense strand; or at the ends of both strands, the sense strand and the antisense strand.

[0304] In certain embodiments, the phosphorothioate or methylphosphonate internucleoside linkage is at the 5′terminus or in the terminal region of one strand, i.e., the sense strand or the antisense strand; or at the ends of both strands, the sense strand and the antisense strand.

[0305] In certain embodiments, a phosphorothioate or a methylphosphonate internucleoside linkage is at both the 5′- and 3′-terminus or in the terminal region of one strand, i.e., the sense strand or the antisense strand; or at the ends of both strands, the sense strand and the antisense strand.

[0306] Any nucleic acid may comprise one or more phosphorothioate (PS) modifications within the nucleic acid, such as at least two PS internucleoside bonds at the ends of a strand.

[0307] At least one of the oligoribonucleoside strands preferably comprises at least two consecutive phosphorothioate modifications in the last 3 nucleosides of the oligonucleoside.

[0308] The invention therefore also relates to: A nucleic acid disclosed herein which comprises phosphorothioate internucleoside linkages respectively between at least two or three consecutive positions, such as in a 5′ and/or 3′ terminal region and/or near terminal region of the second strand, whereby said near terminal region is preferably adjacent said terminal region wherein said one or more abasic nucleosides of said second strand is/are located.

[0309] A nucleic acid disclosed herein which comprises phosphorothioate internucleoside linkages respectively between at least two or three consecutive positions in a 5′ and/or 3′ terminal region of the first strand, whereby preferably the terminal position at the 5′ and/or 3′ terminal region of said first strand is attached to its adjacent position by a phosphorothioate internucleoside linkage.

[0310] The nucleic acid strand may be an RNA comprising a phosphorothioate internucleoside linkage between the three nucleosides contiguous with 2 terminally located abasic nucleosides.

[0311] A preferred nucleic acid is a double stranded RNA comprising 2 adjacent abasic nucleosides at the 5′ terminus of the second strand and a ligand moiety comprising one or more GalNAc ligand moieties at the opposite 3′ end of the second strand. Further preferred, the same nucleic acid may also comprise a phosphorothioate bond between nucleotides at positions 3-4 and 4-5 of the second strand, reading from the position 1 of the second strand. Further preferred, the same nucleic acid may also comprise a 2′ F modification at positions 7, 9 and 11 of the second strand.

[0312] Preferred modifications of nucleic acids having the structure

[chemical structure]

[0313] are as follows:

[0314] A nucleic acid wherein modified nucleosides of said second strand comprise a modification pattern according to any one of the following (5′-3′):

[0315] Me-Me-Me-Me-Me-Me-F—F—F—F—F-Me-Me-Me-Me-Me-Me-Me-F-Me-Me, or

[0316] Me-Me-Me-Me-Me-F—F-Me-F—F—F—F-Me-Me-Me-Me-Me-Me-Me-Me-Me, or

[0317] Me-Me-Me-Me-Me-Me-F-Me-F—F—F—F-Me-Me-Me-Me-Me-Me-Me-Me-Me, or

[0318] Me-Me-Me-Me-Me-Me-Me-Me-F—F—F-Me-Me-Me-Me-Me-Me-Me-Me-Me-Me, or

[0319] Me-Me-Me-Me-Me-Me-F-Me-F—F—F-Me-Me-Me-Me-Me-Me-Me-Me-Me-Me.

[0320] A nucleic acid wherein modified nucleosides of said second strand comprise a modification pattern according to any one of the following (5′-3′):

[0321] Me(s)Me(s)Me-Me-Me-Me-F—F—F—F—F-Me-Me-Me-Me-Me-Me-Me-F-Me-Me, or

[0322] Me(s)Me(s)Me-Me-Me-F—F-Me-F—F—F—F-Me-Me-Me-Me-Me-Me-Me-Me-Me, or

[0323] Me(s)Me(s)Me-Me-Me-Me-F-Me-F—F—F—F-Me-Me-Me-Me-Me-Me-Me-Me-Me, or

[0324] Me(s)Me(s)Me-Me-Me-Me-Me-Me-F—F—F-Me-Me-Me-Me-Me-Me-Me-Me-Me-Me, or

[0325] Me(s)Me(s)Me-Me-Me-Me-F-Me-F—F—F-Me-Me-Me-Me-Me-Me-Me-Me-Me-Me, or

[0326] Me-Me-Me-Me-Me-Me-F—F—F—F—F-Me-Me-Me-Me-Me-Me-Me-F(s)Me(s)Me, or

[0327] Me-Me-Me-Me-Me-F—F-Me-F—F—F—F-Me-Me-Me-Me-Me-Me-Me(s)Me(s)Me, or

[0328] Me-Me-Me-Me-Me-Me-F-Me-F—F—F—F-Me-Me-Me-Me-Me-Me-Me(s)Me(s)Me, or

[0329] Me-Me-Me-Me-Me-Me-Me-Me-F—F—F-Me-Me-Me-Me-Me-Me-Me-Me(s)Me(s)Me, or

[0330] Me-Me-Me-Me-Me-Me-F-Me-F—F—F-Me-Me-Me-Me-Me-Me-Me-Me(s)Me(s)Me,

[0331] wherein (s) is a phosphorothioate internucleoside linkage.

[0332] A nucleic acid wherein modified nucleosides of said second strand comprise a modification pattern according to any one of the following (5′-3′):

[0333] ia-ia-Me-Me-Me-Me-Me-Me-F—F—F—F—F-Me-Me-Me-Me-Me-Me-Me-F-Me-Me, or

[0334] ia-ia-Me-Me-Me-Me-Me-F—F-Me-F—F—F—F-Me-Me-Me-Me-Me-Me-Me-Me-Me, or

[0335] ia-ia-Me-Me-Me-Me-Me-Me-F-Me-F—F—F—F-Me-Me-Me-Me-Me-Me-Me-Me-Me, or

[0336] ia-ia-Me-Me-Me-Me-Me-Me-Me-Me-F—F—F-Me-Me-Me-Me-Me-Me-Me-Me-Me-Me, or

[0337] ia-ia-Me-Me-Me-Me-Me-Me-F-Me-F—F—F-Me-Me-Me-Me-Me-Me-Me-Me-Me-Me, or

[0338] Me-Me-Me-Me-Me-Me-F—F—F—F—F-Me-Me-Me-Me-Me-Me-Me-F-Me-Me-ia-ia, or

[0339] Me-Me-Me-Me-Me-F—F-Me-F—F—F—F-Me-Me-Me-Me-Me-Me-Me-Me-Me-ia-ia, or

[0340] Me-Me-Me-Me-Me-Me-F-Me-F—F—F—F-Me-Me-Me-Me-Me-Me-Me-Me-Me-ia-ia, or

[0341] Me-Me-Me-Me-Me-Me-Me-Me-F—F—F-Me-Me-Me-Me-Me-Me-Me-Me-Me-Me-ia-ia, or

[0342] Me-Me-Me-Me-Me-Me-F-Me-F—F—F-Me-Me-Me-Me-Me-Me-Me-Me-Me-Me-ia-ia,

[0343] wherein ia represents an inverted abasic nucleoside, and when the inverted abasic nucleosides as represented by ia-ia are present at the 3′ terminus of the second strand, said inverted abasic nucleosides are present in a 2 nucleoside overhang.

[0344] A nucleic acid wherein modified nucleosides of said second strand comprise a modification pattern according to any one of the following (5′-3′):

[0345] ia-ia-Me(s)Me(s)Me-Me-Me-Me-F—F—F—F—F-Me-Me-Me-Me-Me-Me-Me-F-Me-Me, or

[0346] ia-ia-Me(s)Me(s)Me-Me-Me-F—F-Me-F—F—F—F-Me-Me-Me-Me-Me-Me-Me-Me-Me, or

[0347] ia-ia-Me(s)Me(s)Me-Me-Me-Me-F-Me-F—F—F—F-Me-Me-Me-Me-Me-Me-Me-Me-Me, or

[0348] ia-ia-Me(s)Me(s)Me-Me-Me-Me-Me-Me-F—F—F-Me-Me-Me-Me-Me-Me-Me-Me-Me-Me, or

[0349] ia-ia-Me(s)Me(s)Me-Me-Me-Me-F-Me-F—F—F-Me-Me-Me-Me-Me-Me-Me-Me-Me-Me, or

[0350] Me-Me-Me-Me-Me-Me-F—F—F—F—F-Me-Me-Me-Me-Me-Me-Me-F(s)Me(s)Me-ia-ia, or

[0351] Me-Me-Me-Me-Me-F—F-Me-F—F—F—F-Me-Me-Me-Me-Me-Me-Me(s)Me(s)Me-ia-ia, or

[0352] Me-Me-Me-Me-Me-Me-F-Me-F—F—F—F-Me-Me-Me-Me-Me-Me-Me(s)Me(s)Me-ia-ia, or

[0353] Me-Me-Me-Me-Me-Me-Me-Me-F—F—F-Me-Me-Me-Me-Me-Me-Me-Me(s)Me(s)Me-ia-ia, or

[0354] Me-Me-Me-Me-Me-Me-F-Me-F—F—F-Me-Me-Me-Me-Me-Me-Me-Me(s)Me(s)Me-ia-ia,

[0355] wherein:

[0356] (s) is a phosphorothioate internucleoside linkage, ia represents an inverted abasic nucleoside, and when the inverted abasic nucleosides as represented by ia-ia are present at the 3′ terminus of the second strand, said inverted abasic nucleosides are present in a 2 nucleoside overhang.

[0357] A nucleic acid wherein modified nucleosides comprise any one of the following modification patterns:

[0358] Modification pattern 1: Second strand (5′-3′): Me-Me-Me-Me-Me-Me-F—F—F—F—F-Me-Me-Me-Me-Me-Me-Me-F-Me-Me, First strand (5′-3′): Me-F-Me-F-Me-F-Me-F— F-Me-Me-Me-Me-F-Me-F-Me-Me-Me-Me-Me-Me-Me

[0359] Or Modification pattern 2: Second strand (5′-3′): Me-Me-Me-Me-Me-F—F-Me-F—F—F—F-Me-Me-Me-Me-Me-Me-Me-Me-Me, First strand (5′-3′): Me-F-Me-F-Me—F-Me-F—F-Me-Me-Me-Me-F-Me-F-Me-Me-Me-Me-Me-Me-Me

[0360] Or Modification pattern 3: Second strand (5′-3′): Me-Me-Me-Me-Me-Me-F-Me-F—F—F—F-Me-Me-Me-Me-Me-Me-Me-Me-Me, First strand (5′-3′): Me-F-Me-F-Me-F-Me-F— F-Me-Me-Me-Me-F-Me-F-Me-Me-Me-Me-Me-Me-Me

[0361] Or Modification pattern 4: Second strand (5′-3′): Me-Me-Me-Me-Me-Me-F-Me-F—F—F—F-Me-Me-Me-Me-Me-Me-Me-Me-Me, First strand (5′-3′): Me-F-Me-F-Me-F-Me-Me-Me-Me-Me-Me-Me-F-Me-F-Me-Me-Me-Me-Me-Me-Me

[0362] Or Modification pattern 5: Second strand (5′-3′): Me-Me-Me-Me-Me-Me-Me-Me-F—F—F-Me-Me-Me-Me-Me-Me-Me-Me-Me-Me, First strand (5′-3′): Me-F-Me-Me-Me-F-Me-Me-F-Me-Me-Me-Me-F-Me-F-Me-Me-Me-Me-Me-Me-Me

[0363] Or Modification pattern 6: Second strand (5′-3′): Me-Me-Me-Me-Me-Me-F-Me-F—F—F-Me-Me-Me-Me-Me-Me-Me-Me-Me-Me, First strand (5′-3′): Me-F-Me-Me-Me-F-Me-Me-F-Me-Me-Me-Me-F-Me-F-Me-Me-Me-Me-Me-Me-Me.

[0364] A nucleic acid wherein modified nucleosides comprise any one of the following modification patterns:

[0365] Modification pattern 1: Second strand (5′-3′): Me(s)Me(s)Me-Me-Me-Me-F—F—F—F—F-Me-Me-Me-Me-Me-Me-Me-F-Me-Me, First strand (5′-3′): Me(s)F(s)Me-F-Me—F-Me-F—F-Me-Me-Me-Me-F-Me-F-Me-Me-Me-Me-Me(s)Me(s)Me

[0366] Or Modification pattern 2: Second strand (5′-3′): Me(s)Me(s)Me-Me-Me-F—F-Me-F—F—F—F-Me-Me-Me-Me-Me-Me-Me-Me-Me, First strand (5′-3′): Me(s)F(s)Me-F-Me-F-Me-F— F-Me-Me-Me-Me-F-Me-F-Me-Me-Me-Me-Me(s)Me(s)Me

[0367] Or Modification pattern 3: Second strand (5′-3′): Me(s)Me(s)Me-Me-Me-Me-F-Me-F—F—F—F-Me-Me-Me-Me-Me-Me-Me-Me-Me, First strand (5′-3′): Me(s)F(s)Me-F-Me-F-Me-F— F-Me-Me-Me-Me-F-Me-F-Me-Me-Me-Me-Me(s)Me(s)Me

[0368] Or Modification pattern 4: Second strand (5′-3′): Me(s)Me(s)Me-Me-Me-Me-F-Me-F—F—F— F-Me-Me-Me-Me-Me-Me-Me-Me-Me, First strand (5′-3′): Me(s)F(s)Me-F-Me-F-Me-Me-Me-Me-Me-Me-Me-F-Me-F-Me-Me-Me-Me-Me(s)Me(s)Me

[0369] Or Modification pattern 5: Second strand (5′-3′): Me(s)Me(s)Me-Me-Me-Me-Me-Me-F—F—F-Me-Me-Me-Me-Me-Me-Me-Me-Me-Me, First strand (5′-3′): Me(s)F(s)Me-Me-Me-F-Me-Me-F-Me-Me-Me-Me-F-Me-F-Me-Me-Me-Me-Me(s)Me(s)Me

[0370] Or Modification pattern 6: Second strand (5′-3′): Me(s)Me(s)Me-Me-Me-Me-F-Me-F—F—F-Me-Me-Me-Me-Me-Me-Me-Me-Me-Me, First strand (5′-3′): Me(s)F(s)Me-Me-Me-F-Me-Me-F-Me-Me-Me-Me-F-Me-F-Me-Me-Me-Me-Me(s)Me(s)Me

[0371] wherein (s) is a phosphorothioate internucleoside linkage.

[0372] A nucleic acid wherein modified nucleosides comprise any one of the following modification patterns:

[0373] Modification pattern 1: Second strand (5′-3′): Me-Me-Me-Me-Me-Me-F—F—F—F—F-Me-Me-Me-Me-Me-Me-Me-F(s)Me(s)Me, First strand (5′-3′): Me(s)F(s)Me-F-Me-F-Me-F— F-Me-Me-Me-Me-F-Me-F-Me-Me-Me-Me-Me(s)Me(s)Me

[0374] Or Modification pattern 2: Second strand (5′-3′): Me-Me-Me-Me-Me-F—F-Me-F—F—F—F-Me-Me-Me-Me-Me-Me-Me(s)Me(s)Me, First strand (5′-3′): Me(s)F(s)Me-F-Me-F-Me-F— F-Me-Me-Me-Me-F-Me-F-Me-Me-Me-Me-Me(s)Me(s)Me

[0375] Or Modification pattern 3: Second strand (5′-3′): Me-Me-Me-Me-Me-Me-F-Me-F—F—F—F-Me-Me-Me-Me-Me-Me-Me(s)Me(s)Me, First strand (5′-3′): Me(s)F(s)Me-F-Me-F-Me-F— F-Me-Me-Me-Me-F-Me-F-Me-Me-Me-Me-Me(s)Me(s)Me

[0376] Or Modification pattern 4: Second strand (5′-3′): Me-Me-Me-Me-Me-Me-F-Me-F—F—F— F-Me-Me-Me-Me-Me-Me-Me(s)Me(s)Me, First strand (5′-3′): Me(s)F(s)Me-F-Me-F-Me-Me-Me-Me-Me-Me-Me-F-Me-F-Me-Me-Me-Me-Me(s)Me(s)Me

[0377] Or Modification pattern 5: Second strand (5′-3′): Me-Me-Me-Me-Me-Me-Me-Me-F—F—F-Me-Me-Me-Me-Me-Me-Me-Me(s)Me(s)Me, First strand (5′-3′): Me(s)F(s)Me-Me-Me-F-Me-Me-F-Me-Me-Me-Me-F-Me-F-Me-Me-Me-Me-Me(s)Me(s)Me

[0378] Or Modification pattern 6: Second strand (5′-3′): Me-Me-Me-Me-Me-Me-F-Me-F—F—F-Me-Me-Me-Me-Me-Me-Me-Me(s)Me(s)Me, First strand (5′-3′): Me(s)F(s)Me-Me-Me-F-Me-Me-F-Me-Me-Me-Me-F-Me-F-Me-Me-Me-Me-Me(s)Me(s)Me

[0379] wherein (s) is a phosphorothioate internucleoside linkage.

[0380] A nucleic acid wherein modified nucleosides comprise any one of the following modification patterns:

[0381] Modification pattern 1: Second strand (5′-3′): ia-ia-Me-Me-Me-Me-Me-Me-F—F—F—F—F-Me-Me-Me-Me-Me-Me-Me-F-Me-Me, First strand (5′-3′): Me-F-Me-F-Me-F-Me-F—F-Me-Me-Me-Me-F-Me-F-Me-Me-Me-Me-Me-Me-Me

[0382] Or Modification pattern 2: Second strand (5′-3′): ia-ia-Me-Me-Me-Me-Me-F—F-Me-F—F—F—F-Me-Me-Me-Me-Me-Me-Me-Me-Me, First strand(5′-3′): Me-F-Me—F-Me-F-Me-F—F-Me-Me-Me-Me-F-Me-F-Me-Me-Me-Me-Me-Me-Me

[0383] Or Modification pattern 3: Second strand (5′-3′): ia-ia-Me-Me-Me-Me-Me-Me-F-Me-F—F—F—F-Me-Me-Me-Me-Me-Me-Me-Me-Me, First strand(5′-3′): Me-F-Me—F-Me-F-Me-F—F-Me-Me-Me-Me-F-Me-F-Me-Me-Me-Me-Me-Me-Me

[0384] Or Modification pattern 4: Second strand (5′-3′): ia-ia-Me-Me-Me-Me-Me-Me-F-Me-F—F—F—F-Me-Me-Me-Me-Me-Me-Me-Me-Me, First strand (5′-3′): Me-F-Me-F-Me-F-Me-Me-Me-Me-Me-Me-Me-F-Me-F-Me-Me-Me-Me-Me-Me-Me

[0385] Or Modification pattern 5: Second strand (5′-3′): ia-ia-Me-Me-Me-Me-Me-Me-Me-Me-F—F-Me-Me-Me-Me-Me-Me-Me-Me-Me-Me, First strand (5′-3′): Me-F-Me-Me-Me-F-Me-Me-F-Me-Me-Me-Me-F-Me-F-Me-Me-Me-Me-Me-Me-Me

[0386] Or Modification pattern 6: Second strand (5′-3′): ia-ia-Me-Me-Me-Me-Me-Me-F-Me-F—F—F-Me-Me-Me-Me-Me-Me-Me-Me, First strand (5′-3′): Me-F-Me-Me-Me-F-Me-Me-F-Me-Me-Me-Me-F-Me-F-Me-Me-Me-Me-Me-Me-Me,

[0387] wherein ia represents an inverted abasic nucleoside.

[0388] A nucleic acid wherein modified nucleosides comprise any one of the following modification patterns:

[0389] Modification pattern 1: Second strand (5′-3′): Me-Me-Me-Me-Me-Me-F—F—F—F—F-Me-Me-Me-Me-Me-Me-Me-F-Me-Me-ia-ia, First strand (5′-3′): Me-F-Me-F-Me-F-Me-F— F-Me-Me-Me-Me-F-Me-F-Me-Me-Me-Me-Me-Me-Me

[0390] Or Modification pattern 2: Second strand (5′-3′): Me-Me-Me-Me-Me-F—F-Me-F—F—F—F-Me-Me-Me-Me-Me-Me-Me-Me-Me-ia-ia, First strand (5′-3′): Me-F-Me—F-Me-F-Me-F—F-Me-Me-Me-Me-F-Me-F-Me-Me-Me-Me-Me-Me-Me

[0391] Or Modification pattern 3: Second strand (5′-3′): Me-Me-Me-Me-Me-Me-F-Me-F—F—F—F-Me-Me-Me-Me-Me-Me-Me-Me-Me-ia-ia, First strand (5′-3′): Me-F-Me-F-Me-F-Me-F— F-Me-Me-Me-Me-F-Me-F-Me-Me-Me-Me-Me-Me-Me

[0392] Or Modification pattern 4: Second strand (5′-3′): Me-Me-Me-Me-Me-Me-F-Me-F—F—F—F-Me-Me-Me-Me-Me-Me-Me-Me-Me-ia-ia, First strand (5′-3′): Me-F-Me-F-Me-F-Me-Me-Me-Me-Me-Me-Me-F-Me-F-Me-Me-Me-Me-Me-Me-Me

[0393] Or Modification pattern 5: Second strand (5′-3′): Me-Me-Me-Me-Me-Me-Me-Me-F—F—F-Me-Me-Me-Me-Me-Me-Me-Me-Me-Me-ia-ia, First strand (5′-3′): Me-F-Me-Me-Me-F-Me-Me-F-Me-Me-Me-Me-F-Me-F-Me-Me-Me-Me-Me-Me-Me

[0394] Or Modification pattern 6: Second strand (5′-3′): Me-Me-Me-Me-Me-Me-F-Me-F—F—F-Me-Me-Me-Me-Me-Me-Me-Me-Me-Me-ia-ia,—First strand (5′-3′): Me-F-Me-Me-Me-F-Me-Me-F-Me-Me-Me-Me-F-Me-F-Me-Me-Me-Me-Me-Me-Me,

[0395] wherein ia represents an inverted abasic nucleoside, and when the inverted abasic nucleosides as represented by ia-ia are present at the 3′ terminus of the second strand, said inverted abasic nucleosides are present in a 2 nucleoside overhang.

[0396] A nucleic acid wherein modified nucleosides comprise any one of the following modification patterns:

[0397] Modification pattern 1: Second strand (5′-3′): ia-ia-Me(s)Me(s)Me-Me-Me-Me-F—F—F—F— F-Me-Me-Me-Me-Me-Me-Me-F-Me-Me, First strand (5′-3′): Me(s)F(s)Me-F-Me-F-Me-F— F-Me-Me-Me-Me-F-Me-F-Me-Me-Me-Me-Me(s)Me(s)Me

[0398] Or Modification pattern 2: Second strand (5′-3′): ia-ia-Me(s)Me(s)Me-Me-Me-F—F-Me-F— F—F—F-Me-Me-Me-Me-Me-Me-Me-Me-Me, First strand (5′-3′): Me(s)F(s)Me-F-Me-F-Me-F—F-Me-Me-Me-Me-F-Me-F-Me-Me-Me-Me-Me(s)Me(s)Me

[0399] Or Modification pattern 3: Second strand (5′-3′): ia-ia-Me(s)Me(s)Me-Me-Me-Me-F-Me-F— F—F—F-Me-Me-Me-Me-Me-Me-Me-Me-Me, First strand (5′-3′): Me(s)F(s)Me-F-Me-F-Me-F—F-Me-Me-Me-Me-F-Me-F-Me-Me-Me-Me-Me(s)Me(s)Me

[0400] Or Modification pattern 4: Second strand (5′-3′): ia-ia-Me(s)Me(s)Me-Me-Me-Me-F-Me-F—F—F—F-Me-Me-Me-Me-Me-Me-Me-Me-Me, First strand (5′-3′): Me(s)F(s)Me-F-Me-F-Me-Me-Me-Me-Me-Me-Me-F-Me-F-Me-Me-Me-Me-Me(s)Me(s)Me

[0401] Or Modification pattern 5: Second strand (5′-3′): ia-ia-Me(s)Me(s)Me-Me-Me-Me-Me-Me-F— F—F-Me-Me-Me-Me-Me-Me-Me-Me-Me-Me, First strand (5′-3′): Me(s)F(s)Me-Me-Me-F-Me-Me-F-Me-Me-Me-Me-F-Me-F-Me-Me-Me-Me-Me(s)Me(s)Me

[0402] Or Modification pattern 6: Second strand (5′-3′): ia-ia-Me(s)Me(s)Me-Me-Me-Me-F-Me-F— F—F-Me-Me-Me-Me-Me-Me-Me-Me-Me-Me, First strand (5′-3′): Me(s)F(s)Me-Me-Me-F-Me-Me-F-Me-Me-Me-Me-F-Me-F-Me-Me-Me-Me-Me(s)Me(s)Me

[0403] wherein:

[0404] (s) is a phosphorothioate internucleoside linkage, ia represents an inverted abasic nucleoside.

[0405] A nucleic acid wherein modified nucleosides comprise any one of the following modification patterns:

[0406] Modification pattern 1: Second strand (5′-3′): Me-Me-Me-Me-Me-Me-F—F—F—F—F-Me-Me-Me-Me-Me-Me-Me-F(s)Me(s)Me-ia-ia, First strand (5′-3′): Me(s)F(s)Me-F-Me-F-Me-F— F-Me-Me-Me-Me-F-Me-F-Me-Me-Me-Me-Me(s)Me(s)Me

[0407] Or Modification pattern 2: Second strand (5′-3′): Me-Me-Me-Me-Me-F—F-Me-F—F—F—F-Me-Me-Me-Me-Me-Me-Me(s)Me(s)Me-ia-ia, First strand (5′-3′): Me(s)F(s)Me-F-Me-F-Me-F—F-Me-Me-Me-Me-F-Me-F-Me-Me-Me-Me-Me(s)Me(s)Me

[0408] Or Modification pattern 3: Second strand (5′-3′): Me-Me-Me-Me-Me-Me-F-Me-F—F—F—F-Me-Me-Me-Me-Me-Me-Me(s)Me(s)Me-ia-ia, First strand (5′-3′): Me(s)F(s)Me-F-Me-F-Me-F—F-Me-Me-Me-Me-F-Me-F-Me-Me-Me-Me-Me(s)Me(s)Me

[0409] Or Modification pattern 4: Second strand (5′-3′): Me-Me-Me-Me-Me-Me-F-Me-F—F—F— F-Me-Me-Me-Me-Me-Me-Me(s)Me(s)Me-ia-ia, First strand (5′-3′): Me(s)F(s)Me-F-Me-F-Me-Me-Me-Me-Me-Me-Me-F-Me-F-Me-Me-Me-Me-Me(s)Me(s)Me

[0410] Or Modification pattern 5: Second strand (5′-3′): Me-Me-Me-Me-Me-Me-Me-Me-F—F—F-Me-Me-Me-Me-Me-Me-Me-Me(s)Me(s)Me-ia-ia, First strand (5′-3′): Me(s)F(s)Me-Me-Me-F-Me-Me-F-Me-Me-Me-Me-F-Me-F-Me-Me-Me-Me-Me(s)Me(s)Me

[0411] Or Modification pattern 6: Second strand (5′-3′): Me-Me-Me-Me-Me-Me-F-Me-F—F—F-Me-Me-Me-Me-Me-Me-Me-Me(s)Me(s)Me-ia-ia, First strand (5′-3′): Me(s)F(s)Me-Me-Me-F-Me-Me-F-Me-Me-Me-Me-F-Me-F-Me-Me-Me-Me-Me(s)Me(s)Me

[0412] wherein: (s) is a phosphorothioate internucleoside linkage, ia represents an inverted abasic nucleoside, and when the inverted abasic nucleosides as represented by ia-ia are present at the 3′ terminus of the second strand, said inverted abasic nucleosides are present in a 2 nucleoside overhang.

[0413] A nucleic acid wherein the first strand comprises a 2′ sugar modification pattern wherein said modifications are selected at least from 2′Me and 2′F sugar modifications, provided that the overall number of 2′F sugar modifications in the first strand does not consist of four, or six, 2′F modifications.

[0414] A nucleic acid wherein the first strand comprises a 2′ sugar modification pattern wherein said modifications are selected at least from 2′Me and 2′F sugar modifications, wherein the overall number of 2′F sugar modifications in the first strand consists of three, five or seven 2′F modifications.

[0415] A nucleic acid wherein the first strand comprises a 2′ sugar modification pattern wherein said modifications are selected at least from 2′Me and 2′F sugar modifications, wherein the overall number of 2′F sugar modifications in the first strand consists of three 2′F modifications. A nucleic acid wherein the first strand comprises a 2′ sugar modification pattern wherein said modifications are selected at least from 2′Me and 2′F sugar modifications, wherein the overall number of 2′F sugar modifications in the first strand consists of five 2′F modifications.

[0416] A nucleic acid wherein the first strand comprises a 2′ sugar modification pattern as follows (5′-3′):

[0417] Me-F-Me-X₂-Me-F-(Me)₇-(F-Me)₂-X₃-Me-X₄-(Me)₃

[0418] wherein X₂, X₃ and X₄ are selected from 2′Me and 2′F sugar modifications, provided that for X₂, X₃ and X₄ at least one is a 2′F sugar modification, and the other two sugar modifications are 2′Me sugar modifications.

[0419] A nucleic acid wherein the first strand comprises a 2′ sugar modification pattern as follows (5′-3′):

[0420] Me-F-Me-X₂-Me-F-(Me)₇-(F-Me)₂-X₃-Me-X₄-(Me)₃

[0421] wherein X₂ is a 2′F sugar modification, and X₃ and X₄ are 2′Me sugar modifications.

[0422] A nucleic acid wherein the first strand comprises a 2′ sugar modification pattern as follows (5′-3′):

[0423] Me-F-Me-X₂-Me-F-(Me)₇-(F-Me)₂-X₃-Me-X₄-(Me)₃

[0424] wherein X₃ is a 2′F sugar modification, and X₂ and X₄ are 2′Me sugar modifications.

[0425] A nucleic acid wherein the first strand comprises a 2′ sugar modification pattern as follows (5′-3′):

[0426] Me-F-Me-X₂-Me-F-(Me)₇-(F-Me)₂-X₃-Me-X₄-(Me)₃

[0427] wherein X₄ is a 2′F sugar modification, and X₂ and X₃ are 2′Me sugar modifications.

[0428] A nucleic acid wherein the first strand comprises a 2′ sugar modification pattern wherein said modifications are selected at least from 2′Me and 2′F sugar modifications, wherein the overall number of 2′F sugar modifications in the first strand consists of seven 2′F modifications.

[0429] A nucleic acid wherein the first strand comprises a 2′ sugar modification pattern as follows (5′-3′):

[0430] Me-F-Me-X₂-Me-F-Me-(F)₂-(Me)₄-(F-Me)₂-X₃-Me-X₄-(Me)₃

[0431] wherein X₂, X₃ and X₄ are selected from 2′Me and 2′F sugar modifications, provided that for X₂, X₃ and X₄ at least one is a 2′F sugar modification, and the other two sugar modifications are 2′Me sugar modifications.

[0432] A nucleic acid wherein the first strand comprises a 2′ sugar modification pattern as follows (5′-3′):

[0433] Me-F-Me-X₂-Me-F-Me-(F)₂-(Me)₄-(F-Me)₂-X₃-Me-X₄-(Me)₃

[0434] wherein X₂ is a 2′F sugar modification, and X₃ and X₄ are 2′Me sugar modifications.

[0435] A nucleic acid wherein the first strand comprises a 2′ sugar modification pattern as follows (5′-3′):

[0436] Me-F-Me-X₂-Me-F-Me-(F)₂-(Me)₄-(F-Me)₂-X₃-Me-X₄-(Me)₃

[0437] wherein X₃ is a 2′F sugar modification, and X₂ and X₄ are 2′Me sugar modifications.

[0438] A nucleic acid wherein the first strand comprises a 2′ sugar modification pattern as follows (5′-3′):

[0439] Me-F-Me-X₂-Me-F-Me-(F)₂-(Me)₄-(F-Me)₂-X₃-Me-X₄-(Me)₃

[0440] wherein X₄ is a 2′F sugar modification, and X₂ and X₃ are 2′Me sugar modifications.

[0441] A nucleic acid wherein the first strand comprises a 2′ sugar modification pattern as follows (5′-3′):

[0442] Me-F-(Me)₃-X₁-(Me)₇-F-Me-F-(Me)₇

[0443] wherein X₁ is a thermally destabilising modification.

[0444] A nucleic acid wherein the first strand comprises a 2′ sugar modification pattern as follows (5′-3′):

[0445] Me-F-(Me)₃-X₁-Me-(F)₂-(Me)₄-F-Me-F-(Me)₇

[0446] wherein X₁ is a thermally destabilising modification.

[0447] A nucleic acid wherein the second strand comprises a 2′ sugar modification pattern as follows (5′-3′):

[0448] (Me)₈-(F)₃-(Me)₁₀.

[0449] A nucleic acid wherein the second strand comprises a 2′ sugar modification pattern as follows (5′-3′):

[0450] (Me)₈-(F)₃-(Me)₁₀, and

[0451] wherein the first strand comprises a 2′ sugar modification pattern wherein said modifications are selected at least from 2′Me and 2′F sugar modifications, provided that the overall number of 2′F sugar modifications in the first strand does not consist of four, or six, 2′F modifications.

[0452] A nucleic acid wherein the second strand comprises a 2′ sugar modification pattern as follows (5′-3′):

[0453] (Me)₈-(F)₃-(Me)₁₀, and

[0454] wherein the first strand comprises a 2′ sugar modification pattern wherein said modifications are selected at least from 2′Me and 2′F sugar modifications, wherein the overall number of 2′F sugar modifications in the first strand consists of three, five or seven 2′F modifications.

[0455] A nucleic acid comprising a first strand that is at least partially complementary to a portion of RNA transcribed from the target gene, and a second strand that is at least partially complementary to the first strand, wherein said first and second strands form a duplex region of at least 17 nucleosides in length, and wherein nucleosides of said second strand comprise a 2′ sugar modification pattern as follows (5′-3′):

[0456] (Me)₈-(F)₃-(Me)₁₀, and

[0457] wherein nucleosides of said first strand comprise a 2′ sugar modification pattern as follows (5′-3′):

[0458] Me-F-(Me)₃-X₁-(Me)₇-F-Me-F-(Me)₇, wherein X₁ is a thermally destabilising modification.

[0459] A nucleic acid comprising a first strand that is at least partially complementary to a portion of RNA transcribed from the target gene, and a second strand that is at least partially complementary to the first strand, wherein said first and second strands form a duplex region of at least 17 nucleosides in length, and wherein nucleosides of said second strand comprise a 2′ sugar modification pattern as follows (5′-3′):

[0460] (Me)₈-(F)₃-(Me)₁₀, and

[0461] wherein nucleosides of said first strand comprise a 2′ sugar modification pattern as follows (5′-3′):

[0462] (Me-F)₃-(Me)₇-F-Me-F-(Me)₇.

[0463] A nucleic acid comprising a first strand that is at least partially complementary to a portion of RNA transcribed from the target gene, and a second strand that is at least partially complementary to the first strand, wherein said first and second strands form a duplex region of at least 17 nucleosides in length, and wherein nucleosides of said second strand comprise a 2′ sugar modification pattern as follows (5′-3′):

[0464] (Me)₈-(F)₃-(Me)₁₀, and

[0465] wherein nucleosides of said first strand comprise a 2′ sugar modification pattern as follows (5′-3′):

[0466] Me-F-(Me)₃-F-(Me)₇-(F-Me)₂-F-(Me)₅.

[0467] A nucleic acid comprising a first strand that is at least partially complementary to a portion of RNA transcribed from the target gene, and a second strand that is at least partially complementary to the first strand, wherein said first and second strands form a duplex region of at least 17 nucleosides in length, and wherein nucleosides of said second strand comprise a 2′ sugar modification pattern as follows (5′-3′):

[0468] (Me)₈-(F)₃-(Me)₁₀, and wherein nucleosides of said first strand comprise a 2′ sugar modification pattern as follows (5′-3′):

[0469] Me-F-(Me)₃-F-(Me)₇-F-Me-F-(Me)₃-F-(Me)₃.

[0470] A nucleic acid comprising a first strand that is at least partially complementary to a portion of RNA transcribed from the target gene, and a second strand that is at least partially complementary to the first strand, wherein said first and second strands form a duplex region of at least 17 nucleosides in length, and wherein nucleosides of said second strand comprise a 2′ sugar modification pattern as follows (5′-3′):

[0471] (Me)₈-(F)₃-(Me)₁₀, and

[0472] wherein nucleosides of said first strand comprise a 2′ sugar modification pattern as follows (5′-3′):

[0473] Me-F-(Me)₃-X₁-Me-(F)₂-(Me)₄-F-Me-F-(Me)₇, wherein X₁ is a thermally destabilising modification.

[0474] A nucleic acid comprising a first strand that is at least partially complementary to a portion of RNA transcribed from the target gene, and a second strand that is at least partially complementary to the first strand, wherein said first and second strands form a duplex region of at least 17 nucleosides in length, and wherein nucleosides of said second strand comprise a 2′ sugar modification pattern as follows (5′-3′):

[0475] (Me)₈-(F)₃-(Me)₁₀, and

[0476] wherein nucleosides of said first strand comprise a 2′ sugar modification pattern as follows (5′-3′):

[0477] (Me-F)₃-Me-(F)₂-(Me)₄-(F-Me)₂-(Me)₆.

[0478] A nucleic acid comprising a first strand that is at least partially complementary to a portion of RNA transcribed from the target gene, and a second strand that is at least partially complementary to the first strand, wherein said first and second strands form a duplex region of at least 17 nucleosides in length, and wherein nucleosides of said second strand comprise a 2′ sugar modification pattern as follows (5′-3′):

[0479] (Me)₈-(F)₃-(Me)₁₀, and

[0480] wherein nucleosides of said first strand comprise a 2′ sugar modification pattern as follows (5′-3′):

[0481] Me-F-(Me)₃-F-Me-(F)₂-(Me)₄-(F-Me)₂-F-(Me)₅.

[0482] A nucleic acid comprising a first strand that is at least partially complementary to a portion of RNA transcribed from the target gene, and a second strand that is at least partially complementary to the first strand, wherein said first and second strands form a duplex region of at least 17 nucleosides in length, and wherein nucleosides of said second strand comprise a 2′ sugar modification pattern as follows (5′-3′):

[0483] (Me)₈-(F)₃-(Me)₁₀, and

[0484] wherein nucleosides of said first strand comprise a 2′ sugar modification pattern as follows (5′-3′):

[0485] Me-F-(Me)₃-F-Me-(F)₂-(Me)₄-(F-Me)₂-(Me)₂-F-(Me)₃.

[0486] A nucleic acid wherein the second strand comprises a 2′ sugar, and abasic modification pattern as follows (5′-3′):

[0487] ia-ia-(Me)₈-(F)₃-(Me)₁₀

[0488] wherein ia represents an inverted abasic nucleoside.

[0489] A nucleic acid wherein the second strand comprises a 2′ sugar, and abasic modification pattern as follows (5′-3′):

[0490] ia-ia-(Me)₈-(F)₃-(Me)₁₀, wherein ia represents an inverted abasic nucleoside; and

[0491] wherein the first strand comprises a 2′ sugar modification pattern wherein said modifications are selected at least from 2′Me and 2′F sugar modifications, provided that the overall number of 2′F sugar modifications in the first strand does not consist of four, or six, 2′F modifications.

[0492] A nucleic acid wherein the second strand comprises a 2′ sugar, and abasic modification pattern as follows (5′-3′):

[0493] ia-ia-(Me)₈-(F)₃-(Me)₁₀, wherein ia represents an inverted abasic nucleoside; and

[0494] wherein the first strand comprises a 2′ sugar modification pattern wherein said modifications are selected at least from 2′Me and 2′F sugar modifications, wherein the overall number of 2′F sugar modifications in the first strand consists of three, five or seven 2′F modifications.

[0495] A nucleic acid comprising a first strand that is at least partially complementary to a portion of RNA transcribed from the target gene, and a second strand that is at least partially complementary to the first strand, wherein said first and second strands form a duplex region of at least 17 nucleosides in length, and wherein nucleosides of said second strand comprise a 2′ sugar, and abasic modification pattern as follows (5′-3′):

[0496] ia-ia-(Me)₈-(F)₃-(Me)₁₀, wherein ia represents an inverted abasic nucleoside; and

[0497] wherein nucleosides of said first strand comprise a 2′ sugar modification pattern as follows (5′-3′):

[0498] Me-F-(Me)₃-X₁-(Me)₇-F-Me-F-(Me)₇, wherein X₁ is a thermally destabilising modification.

[0499] A nucleic acid comprising a first strand that is at least partially complementary to a portion of RNA transcribed from the target gene, and a second strand that is at least partially complementary to the first strand, wherein said first and second strands form a duplex region of at least 17 nucleosides in length, and wherein nucleosides of said second strand comprise a 2′ sugar, and abasic modification pattern as follows (5′-3′):

[0500] ia-ia-(Me)₈-(F)₃-(Me)₁₀, wherein ia represents an inverted abasic nucleoside; and

[0501] wherein nucleosides of said first strand comprise a 2′ sugar modification pattern as follows (5′-3′):

[0502] (Me-F)₃-(Me)₇-F-Me-F-(Me)₇.

[0503] A nucleic acid comprising a first strand that is at least partially complementary to a portion of RNA transcribed from the target gene, and a second strand that is at least partially complementary to the first strand, wherein said first and second strands form a duplex region of at least 17 nucleosides in length, and wherein nucleosides of said second strand comprise a 2′ sugar, and abasic modification pattern as follows (5′-3′):

[0504] ia-ia-(Me)₈-(F)₃-(Me)₁₀, wherein ia represents an inverted abasic nucleoside; and

[0505] wherein nucleosides of said first strand comprise a 2′ sugar modification pattern as follows (5′-3′):

[0506] Me-F-(Me)₃-F-(Me)₇-(F-Me)₂-F-(Me)₅.

[0507] A nucleic acid comprising a first strand that is at least partially complementary to a portion of RNA transcribed from the target gene, and a second strand that is at least partially complementary to the first strand, wherein said first and second strands form a duplex region of at least 17 nucleosides in length, and wherein nucleosides of said second strand comprise a 2′ sugar, and abasic modification pattern as follows (5′-3′):

[0508] ia-ia-(Me)₈-(F)₃-(Me)₁₀, wherein ia represents an inverted abasic nucleoside; and wherein nucleosides of said first strand comprise a 2′ sugar modification pattern as follows (5′-3′):

[0509] Me-F-(Me)₃-F-(Me)₇-F-Me-F-(Me)₃-F-(Me)₃.

[0510] A nucleic acid comprising a first strand that is at least partially complementary to a portion of RNA transcribed from the target gene, and a second strand that is at least partially complementary to the first strand, wherein said first and second strands form a duplex region of at least 17 nucleosides in length, and wherein nucleosides of said second strand comprise a 2′ sugar, and abasic modification pattern as follows (5′-3′):

[0511] ia-ia-(Me)₈-(F)₃-(Me)₁₀, wherein ia represents an inverted abasic nucleoside; and wherein nucleosides of said first strand comprise a 2′ sugar modification pattern as follows (5′-3′):

[0512] Me-F-(Me)₃-X₁-Me-(F)₂-(Me)₄-F-Me-F-(Me)₇,

[0513] wherein X₁ is a thermally destabilising modification.

[0514] A nucleic acid comprising a first strand that is at least partially complementary to a portion of RNA transcribed from the target gene, and a second strand that is at least partially complementary to the first strand, wherein said first and second strands form a duplex region of at least 17 nucleosides in length, and wherein nucleosides of said second strand comprise a 2′ sugar, and abasic modification pattern as follows (5′-3′):

[0515] ia-ia-(Me)₈-(F)₃-(Me)₁₀, wherein ia represents an inverted abasic nucleoside; and

[0516] wherein nucleosides of said first strand comprise a 2′ sugar modification pattern as follows (5′-3′):

[0517] (Me-F)₃-Me-(F)₂-(Me)₄-(F-Me)₂-(Me)₆.

[0518] A nucleic acid comprising a first strand that is at least partially complementary to a portion of RNA transcribed from the target gene, and a second strand that is at least partially complementary to the first strand, wherein said first and second strands form a duplex region of at least 17 nucleosides in length, and wherein nucleosides of said second strand comprise a 2′ sugar, and abasic modification pattern as follows (5′-3′):

[0519] ia-ia-(Me)₈-(F)₃-(Me)₁₀, wherein ia represents an inverted abasic nucleoside; and

[0520] wherein nucleosides of said first strand comprise a 2′ sugar modification pattern as follows (5′-3′):

[0521] Me-F-(Me)₃-F-Me-(F)₂-(Me)₄-(F-Me)₂-F-(Me)₅.

[0522] A nucleic acid comprising a first strand that is at least partially complementary to a portion of RNA transcribed from the target gene, and a second strand that is at least partially complementary to the first strand, wherein said first and second strands form a duplex region of at least 17 nucleosides in length, and wherein nucleosides of said second strand comprise a 2′ sugar, and abasic modification pattern as follows (5′-3′):

[0523] ia-ia-(Me)₈-(F)₃-(Me)₁₀, wherein ia represents an inverted abasic nucleoside; and

[0524] wherein nucleosides of said first strand comprise a 2′ sugar modification pattern as follows (5′-3′):

[0525] Me-F-(Me)₃-F-Me-(F)₂-(Me)₄-(F-Me)₂-(Me)₂-F-(Me)₃.

[0526] A nucleic acid wherein the second strand comprises a 2′ sugar modification pattern as follows (5′-3′):

[0527] ia-ia-Me(s)Me(s) (Me)₆-(F)₃-(Me)₁₀,

[0528] wherein ia represents an inverted abasic nucleoside, and (s) represents a phosphorothioate linkage.

[0529] A nucleic acid wherein the second strand comprises a 2′ sugar modification pattern as follows (5′-3′):

[0530] ia-ia-Me(s)Me(s) (Me)₆-(F)₃-(Me)₁₀, wherein ia represents an inverted abasic nucleoside, and (s) represents a phosphorothioate linkage; and

[0531] wherein the first strand comprises a 2′ sugar modification pattern wherein said modifications are selected at least from 2′Me and 2′F sugar modifications, provided that the overall number of 2′F sugar modifications in the first strand does not consist of four, or six, 2′F modifications.

[0532] A nucleic acid wherein the second strand comprises a 2′ sugar modification pattern as follows (5′-3′):

[0533] ia-ia-Me(s)Me(s) (Me)₆-(F)₃-(Me)₁₀, wherein ia represents an inverted abasic nucleoside, and (s) represents a phosphorothioate linkage; and

[0534] wherein the first strand comprises a 2′ sugar modification pattern wherein said modifications are selected at least from 2′Me and 2′F sugar modifications, wherein the overall number of 2′F sugar modifications in the first strand consists of three, five or seven 2′F modifications.

[0535] A nucleic acid comprising a first strand that is at least partially complementary to a portion of RNA transcribed from the target gene, and a second strand that is at least partially complementary to the first strand, wherein said first and second strands form a duplex region of at least 17 nucleosides in length, and wherein nucleosides of said second strand comprise a 2′ sugar, and abasic modification pattern as follows (5′-3′):

[0536] ia-ia-Me(s)Me(s) (Me)₆-(F)₃-(Me)₁₀, wherein ia represents an inverted abasic nucleoside, and (s) represents a phosphorothioate linkage, and

[0537] wherein nucleosides of said first strand comprise a 2′ sugar modification pattern as follows (5′-3′):

[0538] Me(s)F(s)(Me)₃-X₁-(Me)₇-F-Me-F-(Me)₅(s)Me(s)Me, wherein X₁ is a thermally destabilising modification.

[0539] A nucleic acid comprising a first strand that is at least partially complementary to a portion of RNA transcribed from the target gene, and a second strand that is at least partially complementary to the first strand, wherein said first and second strands form a duplex region of at least 17 nucleosides in length, and wherein nucleosides of said second strand comprise a 2′ sugar, and abasic modification pattern as follows (5′-3′):

[0540] ia-ia-Me(s)Me(s) (Me)₆-(F)₃-(Me)₁₀, wherein ia represents an inverted abasic nucleoside, and (s) represents a phosphorothioate linkage, and

[0541] wherein nucleosides of said first strand comprise a 2′ sugar modification pattern as follows (5′-3′):

[0542] Me(s)F(s)Me-F-Me-F-(Me)₇-F-Me-F-(Me)₅(s)Me(s)Me.

[0543] A nucleic acid comprising a first strand that is at least partially complementary to a portion of RNA transcribed from the target gene, and a second strand that is at least partially complementary to the first strand, wherein said first and second strands form a duplex region of at least 17 nucleosides in length, and wherein nucleosides of said second strand comprise a 2′ sugar, and abasic modification pattern as follows (5′-3′):

[0544] ia-ia-Me(s)Me(s) (Me)₆-(F)₃-(Me)₁₀, wherein ia represents an inverted abasic nucleoside, and (s) represents a phosphorothioate linkage, and

[0545] wherein nucleosides of said first strand comprise a 2′ sugar modification pattern as follows (5′-3′):

[0546] Me(s)F(s)(Me)₃-F-(Me)₇-(F-Me)₂-F-(Me)₃(s)Me(s)Me.

[0547] A nucleic acid comprising a first strand that is at least partially complementary to a portion of RNA transcribed from the target gene, and a second strand that is at least partially complementary to the first strand, wherein said first and second strands form a duplex region of at least 17 nucleosides in length, and wherein nucleosides of said second strand comprise a 2′ sugar, and abasic modification pattern as follows (5′-3′):

[0548] ia-ia-Me(s)Me(s) (Me)₆-(F)₃-(Me)₁₀, wherein ia represents an inverted abasic nucleoside, and (s) represents a phosphorothioate linkage, and

[0549] wherein nucleosides of said first strand comprise a 2′ sugar modification pattern as follows (5′-3′):

[0550] Me(s)F(s)(Me)₃-F-(Me)₇-F-Me-F-(Me)₃-F-Me(s)Me(s)Me.

[0551] A nucleic acid comprising a first strand that is at least partially complementary to a portion of RNA transcribed from the target gene, and a second strand that is at least partially complementary to the first strand, wherein said first and second strands form a duplex region of at least 17 nucleosides in length, and wherein nucleosides of said second strand comprise a 2′ sugar, and abasic modification pattern as follows (5′-3′):

[0552] ia-ia-Me(s)Me(s) (Me)₆-(F)₃-(Me)₁₀, wherein ia represents an inverted abasic nucleoside, and (s) represents a phosphorothioate linkage, and

[0553] wherein nucleosides of said first strand comprise a 2′ sugar modification pattern as follows (5′-3′):

[0554] Me(s)F(s)(Me)₃-X₁-Me-(F)₂-(Me)₄-F-Me-F-(Me)₅(s)Me(s)Me, wherein X₁ is a thermally destabilising modification.

[0555] A nucleic acid comprising a first strand that is at least partially complementary to a portion of RNA transcribed from the target gene, and a second strand that is at least partially complementary to the first strand, wherein said first and second strands form a duplex region of at least 17 nucleosides in length, and wherein nucleosides of said second strand comprise a 2′ sugar, and abasic modification pattern as follows (5′-3′):

[0556] ia-ia-Me(s)Me(s) (Me)₆-(F)₃-(Me)₁₀, wherein ia represents an inverted abasic nucleoside, and (s) represents a phosphorothioate linkage, and

[0557] wherein nucleosides of said first strand comprise a 2′ sugar modification pattern as follows (5′-3′):

[0558] Me(s)F(s)Me-F-Me-F-Me-(F)₂-(Me)₄-(F-Me)₂-(Me)₄(s)Me(s)Me.

[0559] A nucleic acid comprising a first strand that is at least partially complementary to a portion of RNA transcribed from the target gene, and a second strand that is at least partially complementary to the first strand, wherein said first and second strands form a duplex region of at least 17 nucleosides in length, and wherein nucleosides of said second strand comprise a 2′ sugar, and abasic modification pattern as follows (5′-3′):

[0560] ia-ia-Me(s)Me(s) (Me)₆-(F)₃-(Me)₁₀, wherein ia represents an inverted abasic nucleoside, and (s) represents a phosphorothioate linkage, and

[0561] wherein nucleosides of said first strand comprise a 2′ sugar modification pattern as follows (5′-3′):

[0562] Me(s)F(s)(Me)₃-F-Me-(F)₂-(Me)₄-(F-Me)₂-F-(Me)₃(s)Me(s)Me.

[0563] A nucleic acid comprising a first strand that is at least partially complementary to a portion of RNA transcribed from the target gene, and a second strand that is at least partially complementary to the first strand, wherein said first and second strands form a duplex region of at least 17 nucleosides in length, and wherein nucleosides of said second strand comprise a 2′ sugar, and abasic modification pattern as follows (5′-3′):

[0564] ia-ia-Me(s)Me(s) (Me)₆-(F)₃-(Me)₁₀, wherein ia represents an inverted abasic nucleoside, and (s) represents a phosphorothioate linkage, and

[0565] wherein nucleosides of said first strand comprise a 2′ sugar modification pattern as follows (5′-3′):

[0566] Me(s)F(s)(Me)₃-F-Me-(F)₂-(Me)₄-(F-Me)₂-(Me)₂-F-Me(s)Me(s)Me.

[0567] Preferred modifications are as follows:

[0568] Modification pattern 1:

[0569] Second strand (5′-3′): ia-ia-Me-Me-Me-Me-Me-Me-Me-Me-F—F—F-Me-Me-Me-Me-Me-Me-Me-Me-Me-Me,

[0570] First strand (5′-3′): Me-F-Me-Me-Me-X₁-Me-Me-Me-Me-Me-Me-Me-F-Me-F-Me-Me-Me-Me-Me-Me-Me, wherein X₁ is a thermally destabilising modification;

[0571] Or Modification pattern 2:

[0572] Second strand (5′-3′): ia-ia-Me-Me-Me-Me-Me-Me-Me-Me-F—F—F-Me-Me-Me-Me-Me-Me-Me-Me-Me-Me,

[0573] First strand (5′-3′): Me-F-Me-F-Me-F-Me-Me-Me-Me-Me-Me-Me-F-Me—F-Me-Me-Me-Me-Me-Me-Me;

[0574] Or Modification pattern 3:

[0575] Second strand (5′-3′): ia-ia-Me-Me-Me-Me-Me-Me-Me-Me-F—F—F-Me-Me-Me-Me-Me-Me-Me-Me-Me-Me,

[0576] First strand (5′-3′): Me-F-Me-Me-Me-F-Me-Me-Me-Me-Me-Me-Me-F-Me-F-Me-F-Me-Me-Me-Me-Me;

[0577] Or Modification pattern 4:

[0578] Second strand (5′-3′): ia-ia-Me-Me-Me-Me-Me-Me-Me-Me-F—F—F-Me-Me-Me-Me-Me-Me-Me-Me-Me-Me,

[0579] First strand (5′-3′): Me-F-Me-Me-Me-F-Me-Me-Me-Me-Me-Me-Me-F-Me-F-Me-Me-Me-F-Me-Me-Me;

[0580] Or Modification pattern 5:

[0581] Second strand (5′-3′): ia-ia-Me-Me-Me-Me-Me-Me-Me-Me-F—F—F-Me-Me-Me-Me-Me-Me-Me-Me-Me-Me,

[0582] First strand (5′-3′): Me-F-Me-Me-Me-X₁-Me-F—F-Me-Me-Me-Me-F-Me—F-Me-Me-Me-Me-Me-Me-Me, wherein X₁ is a thermally destabilising modification;

[0583] Or Modification pattern 6:

[0584] Second strand (5′-3′): ia-ia-Me-Me-Me-Me-Me-Me-Me-Me-F—F—F-Me-Me-Me-Me-Me-Me-Me-Me-Me-Me,

[0585] First strand (5′-3′): Me-F-Me-F-Me-F-Me-F—F-Me-Me-Me-Me-F-Me-F-Me-Me-Me-Me-Me-Me-Me;

[0586] Or Modification pattern 7:

[0587] Second strand (5′-3′): ia-ia-Me-Me-Me-Me-Me-Me-Me-Me-F—F—F-Me-Me-Me-Me-Me-Me-Me-Me-Me-Me,

[0588] First strand (5′-3′): Me-F-Me-Me-Me-F-Me-F—F-Me-Me-Me-Me-F-Me—F-Me-F-Me-Me-Me-Me-Me;

[0589] Or Modification pattern 8:

[0590] Second strand (5′-3′): ia-ia-Me-Me-Me-Me-Me-Me-Me-Me-F—F—F-Me-Me-Me-Me-Me-Me-Me-Me-Me-Me,

[0591] First strand (5′-3′): Me-F-Me-Me-Me-F-Me-F—F-Me-Me-Me-Me-F-Me—F-Me-Me-Me-F-Me-Me-Me.

[0592] Particularly preferred modifications are as follows:

[0593] Modification pattern 1:

[0594] Second strand (5′-3′): ia-ia-Me(s)Me(s)Me-Me-Me-Me-Me-Me-F—F—F-Me-Me-Me-Me-Me-Me-Me-Me-Me-Me,

[0595] First strand (5′-3′): Me(s)F(s)Me-Me-Me-X₁-Me-Me-Me-Me-Me-Me-Me-F-Me-F-Me-Me-Me-Me-Me(s)Me(s)Me, wherein X₁ is a thermally destabilising modification;

[0596] Or Modification pattern 2:

[0597] Second strand (5′-3′): ia-ia-Me(s)Me(s)Me-Me-Me-Me-Me-Me-F—F—F-Me-Me-Me-Me-Me-Me-Me-Me-Me-Me,

[0598] First strand (5′-3′): Me(s)F(s)Me-F-Me-F-Me-Me-Me-Me-Me-Me-Me-F-Me-F-Me-Me-Me-Me-Me(s)Me(s)Me;

[0599] Or Modification pattern 3:

[0600] Second strand (5′-3′): ia-ia-Me(s)Me(s)Me-Me-Me-Me-Me-Me-F—F—F-Me-Me-Me-Me-Me-Me-Me-Me-Me-Me,

[0601] First strand (5′-3′): Me(s)F(s)Me-Me-Me-F-Me-Me-Me-Me-Me-Me-Me-F-Me-F-Me-F-Me-Me-Me(s)Me(s)Me;

[0602] Or Modification pattern 4:

[0603] Second strand (5′-3′): ia-ia-Me(s)Me(s)Me-Me-Me-Me-Me-Me-F—F—F-Me-Me-Me-Me-Me-Me-Me-Me-Me-Me,

[0604] First strand (5′-3′): Me(s)F(s)Me-Me-Me-F-Me-Me-Me-Me-Me-Me-Me-F-Me-F-Me-Me-Me-F-Me(s)Me(s)Me;

[0605] Or Modification pattern 5:

[0606] Second strand (5′-3′): ia-ia-Me(s)Me(s)Me-Me-Me-Me-Me-Me-F—F—F-Me-Me-Me-Me-Me-Me-Me-Me-Me-Me,

[0607] First strand (5′-3′): Me(s)F(s)Me-Me-Me-X₁-Me-F—F-Me-Me-Me-Me-F-Me—F-Me-Me-Me-Me-Me(s)Me(s)Me, wherein X₁ is a thermally destabilising modification;

[0608] Or Modification pattern 6:

[0609] Second strand (5′-3′): ia-ia-Me(s)Me(s)Me-Me-Me-Me-Me-Me-F—F—F-Me-Me-Me-Me-Me-Me-Me-Me-Me-Me,

[0610] First strand (5′-3′): Me(s)F(s)Me-F-Me-F-Me-F—F-Me-Me-Me-Me-F-Me-F-Me-Me-Me-Me-Me(s)Me(s)Me;

[0611] Or Modification pattern 7:

[0612] Second strand (5′-3′): ia-ia-Me(s)Me(s)Me-Me-Me-Me-Me-Me-F—F—F-Me-Me-Me-Me-Me-Me-Me-Me-Me-Me,

[0613] First strand (5′-3′): Me(s)F(s)Me-Me-Me-F-Me-F—F-Me-Me-Me-Me-F-Me—F-Me-F-Me-Me-Me(s)Me(s)Me;

[0614] Or Modification pattern 8:

[0615] Second strand (5′-3′): ia-ia-Me(s)Me(s)Me-Me-Me-Me-Me-Me-F—F—F-Me-Me-Me-Me-Me-Me-Me-Me-Me-Me,

[0616] First strand (5′-3′): Me(s)F(s)Me-Me-Me-F-Me-F—F-Me-Me-Me-Me-F-Me—F-Me-Me-Me-F-Me(s)Me(s)Me;

[0617] wherein (s) is a phosphorothioate internucleoside linkage.

### Conjugation of Nucleic Acid to Ligand

[0618] Another modification of a nucleic acid e.g. RNA e.g. an siRNA of the invention involves linking the nucleic acid e.g. the siRNA to one or more ligand moieties e.g. to enhance the activity, cellular distribution, or cellular uptake of the nucleic acid e.g. siRNA e.g., into a cell.

[0619] In some embodiments, the ligand moiety described can be attached to a nucleic acid e.g. an siRNA oligonucleoside, via a linker that can be cleavable or non-cleavable. The term “linker” or “linking group” means an organic moiety that connects two parts of a compound, e.g., covalently attaches two parts of a compound.

[0620] The ligand can be attached to the 3′ or 5′ end of the sense strand.

[0621] The ligand is preferably conjugated to 3′ end of the sense strand of the nucleic acid e.g. an siRNA agent.

[0622] The invention therefore relates in a further aspect to a conjugate for inhibiting expression of a target e.g. a target gene, in a cell, said conjugate comprising a nucleic acid portion and one or more ligand moieties, said nucleic acid portion comprising a nucleic acid as disclosed herein.

[0623] In one aspect the second strand of the nucleic acid is conjugated directly or indirectly (e.g. via a linker) to the one or more ligand moiety(s), wherein said ligand moiety is typically present at a terminal region of the second strand, preferably at the 3′ terminal region thereof.

[0624] In certain embodiments, the ligand moiety comprises a GalNAc or GalNAc derivative attached to the nucleic acid e.g. dsiRNA through a linker.

[0625] Therefore, the invention relates to a conjugate wherein the ligand moiety comprises
[0626] i) one or more GalNAc ligands; and/or
[0627] ii) one or more GalNAc ligand derivatives; and/or
[0628] iii) one or more GalNAc ligands conjugated to said nucleic acid through a linker.

[0629] Said GalNAc ligand may be conjugated directly or indirectly to the 5′ or 3′ terminal region of the second strand of the nucleic acid, preferably at the 3′ terminal region thereof.

[0630] GalNAc ligands are well known in the art and described in, inter alia, EP3775207A1.

[0631] In some embodiments, the ligand moiety comprises one or more ligands.

[0632] In some embodiments, the ligand moiety comprises one or more carbohydrate ligands.

[0633] In some embodiments, the one or more carbohydrates can be a monosaccharide, disaccharide, trisaccharide, tetrasaccharide, oligosaccharide and/or polysaccharide.

[0634] In some embodiments, the one or more carbohydrates comprise one or more galactose moieties, one or more lactose moieties, one or more N-AcetylGalactosamine moieties, and/or one or more mannose moieties.

[0635] In some embodiments, the one or more carbohydrates comprise one or more N-Acetyl-Galactosamine moieties.

[0636] In some embodiments, the compounds as described anywhere herein comprise two or three N-AcetylGalactosamine moieties.

[0637] In some embodiments, the one or more ligands are attached in a linear configuration, or in a branched configuration, for example each configuration being respectively attached to a branch point in an overall linker.

[0638] Exemplary linear configurations and Exemplary branched configurations are shown in FIGS. 1a and 1b:

[0639] In FIG. 1a, (linear), (a) and/or (b) can typically represent connecting bonds or groups, such as phosphate or phosphorothioate groups.

[0640] In FIG. 1b, (branched), in some embodiments, the one or more ligands are attached as a biantennary or triantennary branched configuration. Typically, a triantennary branched configuration can be preferred, such as an N-AcetylGalactosamine triantennary branched configuration.

### Linker

[0641] Exemplary compounds of the invention comprise a ‘linker moiety’, such as that as depicted in Formula (I), that is part of an overall ‘linker’.

[chemical structure]

[0642] wherein:
[0643] R₁ at each occurrence is independently selected from the group consisting of hydrogen, methyl and ethyl;
[0644] R₂ is selected from the group consisting of hydrogen, hydroxy, —OC₁₋₃alkyl, —C(═O)OC₁₋₃alkyl, halo and nitro;
[0645] X₁ and X₂ at each occurrence are independently selected from the group consisting of methylene, oxygen and sulfur;
[0646] m is an integer of from 1 to 6;
[0647] n is an integer of from 1 to 10;
[0648] q, r, s, t, v are independently integers from 0 to 4, with the proviso that:
[0649] (i) q and r cannot both be 0 at the same time; and
[0650] (ii) s, t and v cannot all be 0 at the same time;
[0651] Z is an oligonucleoside moiety.

[0652] As will be further understood in the art, exemplary compounds of the invention comprise an overall linker that is located between the oligonucleoside moiety and the ligand moiety of these compounds. The overall linker, thereby ‘links’ the oligonucleoside moiety and the ligand moiety to each other.

[0653] The overall linker is often notionally envisaged as comprising one or more linker building blocks. For example, there is a linker portion that is depicted as the ‘linker moiety’ as represented in Formula (I) positioned adjacent the ligand moiety and attaching the ligand moiety, typically via a branch point, directly or indirectly to the oligonucleoside moiety. The linker moiety as depicted in Formula (I) can also often be referred to as the ‘ligand arm or arms’ of the overall linker. There can also, but not always, be a further linker portion between the oligonucleoside moiety and the branch point, that is often referred to as the ‘tether moiety’ of the overall linker, ‘tethering’ the oligonucleoside moiety to the remainder of the conjugated compound. Such ‘ligand arms’ and/or ‘linker moieties’ and/or ‘tether moieties’ can be envisaged by reference to the linear and/or branched configurations as set out above.

[0654] As can be seen from the claims, and the reminder of the patent specification, the scope of the present invention extends to linear or branched configurations, and with no limitation as to the number of individual ligands that might be present. Furthermore, the addressee will also be aware that there are many structures that could be used as the linker moiety, based on the state of the art and the expertise of an oligonucleoside chemist.

[0655] The remainder of the overall linker (other than the linker moiety) as set out in the claims, and the remainder of the patent specification, is shown by its chemical constituents in Formula (I), which the inventors consider to be particularly unique to the current invention. In more general terms, however, these chemical constituents could be described as a ‘tether moiety’ as hereinbefore described, wherein the ‘tether moiety’ is that portion of the overall linker which comprises the group of atoms between Z, namely the oligonucleoside moiety, and the linker moiety as depicted in Formula (I).

### Tether Moiety of Formula I

[0656] In relation to Formula (I), the ‘tether moiety’ comprises the group of atoms between Z, namely the oligonucleoside moiety, and the linker moiety.

[0657] In some embodiments, R₁ is hydrogen at each occurrence. In some embodiments, R₁ is methyl.

[0658] In some embodiments, R₁ is ethyl.

[0659] In some embodiments, R₂ is hydroxy. In some embodiments, R₂ is halo. In some embodiments, R₂ is fluoro. In some embodiments, R₂ is chloro. In some embodiments, R₂ is bromo. In some embodiments, R₂ is iodo. In some embodiments, R₂ is nitro.

[0660] In some embodiments, X₁ is methylene. In some embodiments, X₁ is oxygen. In some embodiments, X₁ is sulfur.

[0661] In some embodiments, X₂ is methylene. In some embodiments, X₂ is oxygen. In some embodiments, X₂ is sulfur.

[0662] In some embodiments, m=3.

[0663] In some embodiments, n=6.

[0664] In some embodiments, X₁ is oxygen and X₂ is methylene. In some embodiments, both X₁ and X₂ are methylene.

[0665] In some embodiments, q=1, r=2, s=1, t=1, v=1. In some embodiments, q=1, r=3, s=1, t=1, v=1.

[0666] In some embodiments, R₁ is hydrogen at each occurrence, n=6, m=3, R₂ is fluoro, X₂ is methylene, v=1, t=1, s=1, X₁ is methylene, q=1 and r=2.

[0667] Thus, in some embodiments, exemplary compounds of the invention comprise the following structure:

[chemical structure]

[0668] In some embodiments, R₁ is hydrogen at each occurrence, n=6, m=3, R₂ is fluoro, X₂ is methylene, y=1, t=1, s=1, X₁ is oxygen, q=1 and r=2.

[0669] Thus, in some embodiments, exemplary compounds of the invention comprise the following structure:

[chemical structure]

### Alternative Tether Moieties

[0670] During the synthesis of compounds of the present invention, alternative tether moiety structures may arise. In some embodiments, alternative tether moieties have a change of one or more atoms in the tether moiety of the overall linker compared to tether moieties described anywhere herein.

[0671] In some embodiments, the alternative tether moiety is a compound of Formula (I) as described anywhere herein, wherein R₂ is hydroxy.

[0672] In some embodiments, R₁ is hydrogen at each occurrence, n=6, m=3, R₂ is hydroxy, X₂ is methylene, v=1, t=1, s=1, X₁ is methylene, q=1 and r=2.

[0673] Thus, in some embodiments, compounds of the invention comprise the following structure:

[chemical structure]

[0674] In some embodiments, R₁ is hydrogen at each occurrence, n=6, m=3, R₂ is hydroxy, X₂ is methylene, v=1, t=1, s=1, X₁ is oxygen, q=1 and r=2.

[0675] Thus, in some embodiments, compounds of the invention comprise the following structure:

[chemical structure]

### Linker Moiety

[0676] In relation to Formula (I), the ‘linker moiety’ as depicted in Formula (I) comprises the group of atoms located between the tether moiety as described anywhere herein, and the ligand moiety as described anywhere herein.

[0677] In some embodiments:

[chemical structure]

[0678] as depicted in Formula (I) as described anywhere herein is any of Formulae (VIa), (VIb) or (VIc), preferably Formula (VIa):

[chemical structure]

[0679] wherein:
[0680] A₁ is hydrogen, or a suitable hydroxy protecting group;
[0681] a is an integer of 2 or 3; and
[0682] b is an integer of 2 to 5; or

[chemical structure]

[0683] wherein:
[0684] A₁ is hydrogen, or a suitable hydroxy protecting group;
[0685] a is an integer of 2 or 3; and
[0686] c and d are independently integers of 1 to 6; or

[chemical structure]

[0687] wherein:
[0688] A₁ is hydrogen, or a suitable hydroxy protecting group;
[0689] a is an integer of 2 or 3; and
[0690] e is an integer of 2 to 10.

[0691] In some embodiments, the moiety:

[chemical structure]

[0692] as depicted in Formula (I) is Formula (VIa):

[chemical structure]

[0693] wherein:
[0694] A₁ is hydrogen, or a suitable hydroxy protecting group;
[0695] a is 3; and
[0696] b is an integer of 3.

[0697] In some embodiments, the moiety:

[chemical structure]

[0698] as depicted in Formula (I) as described anywhere herein is Formula (VII):

[chemical structure]

[0699] wherein:
[0700] A₁ is hydrogen;
[0701] a is an integer of 2 or 3, preferably 3.

[0702] Other exemplary compounds of the invention comprise a ‘linker moiety’, as depicted in Formula (I*), that is part of an overall ‘linker’.

[chemical structure]

[0703] Where:
[0704] r and s are independently an integer selected from 1 to 16; and
[0705] Z is an oligonucleoside moiety.

[0706] As will be further understood in the art, exemplary compounds of the invention comprise an overall linker that is located between the oligonucleoside moiety and the ligand moiety of these compounds. The overall linker, thereby ‘links’ the oligonucleoside moiety and the ligand moiety to each other.

[0707] The overall linker is often notionally envisaged as comprising one or more linker building blocks. For example, there is a linker portion that is depicted as the ‘linker moiety’ as represented in Formula (I*) positioned adjacent the ligand moiety and attaching the ligand moiety, typically via a branch point, directly or indirectly to the oligonucleoside moiety. The linker moiety as depicted in Formula (I*) can also often be referred to as the ‘ligand arm or arms’ of the overall linker. There can also, but not always, be a further linker portion between the oligonucleoside moiety and the branch point, that is often referred to as the ‘tether moiety’ of the overall linker, ‘tethering’ the oligonucleoside moiety to the remainder of the conjugated compound. Such ‘ligand arms’ and/or ‘linker moieties’ and/or ‘tether moieties’ can be envisaged by reference to the linear and/or branched configurations as set out above.

[0708] As can be seen from the claims, and the reminder of the patent specification, the scope of the present invention extends to linear or branched configurations, and with no limitation as to the number of individual ligands that might be present. Furthermore, the addressee will also be aware that there are many structures that could be used as the linker moiety, based on the state of the art and the expertise of an oligonucleoside chemist.

[0709] The remainder of the overall linker (other than the linker moiety) as set out in the claims, and the remainder of the patent specification, is shown by its chemical constituents in Formula (I), which the inventors consider to be particularly unique to the current invention. In more general terms, however, these chemical constituents could be described as a ‘tether moiety’ as hereinbefore described, wherein the ‘tether moiety’ is that portion of the overall linker which comprises the group of atoms between Z, namely the oligonucleoside moiety, and the linker moiety as depicted in Formula (I).

### Tether Moiety

[0710] In relation to Formula (I*), the ‘tether moiety’ comprises the group of atoms between Z, namely the oligonucleoside moiety, and the linker moiety.

[0711] In some embodiments, s is an integer selected from 4 to 12. In some embodiments, s is 6.

[0712] In some embodiments, r is an integer selected from 4 to 14. In some embodiments, r is 6. In some embodiments, r is 12.

[0713] In some embodiments, r is 12 and s is 6.

[0714] Thus, in some embodiments, exemplary compounds of the invention comprise the following structure:

[chemical structure]

[0715] In some embodiments, r is 6 and s is 6.

[0716] Thus, in some embodiments, exemplary compounds of the invention comprise the following structure:

[chemical structure]

### Linker Moiety

[0717] In relation to Formula (I*), the ‘linker moiety’ as depicted in Formula (I) comprises the group of atoms located between the tether moiety as described anywhere herein, and the ligand moiety as described anywhere herein.

[0718] In some embodiments, the moiety:

[chemical structure]

[0719] as depicted in Formula (I*) as described anywhere herein is any of Formulae (IV*), (V*) or (VI*), preferably Formula (IV*):

[chemical structure]

[0720] wherein:
[0721] A₁ is hydrogen, or a suitable hydroxy protecting group;
[0722] a is an integer of 2 or 3; and
[0723] b is an integer of 2 to 5; or

[chemical structure]

[0724] wherein:
[0725] A₁ is hydrogen, or a suitable hydroxy protecting group;
[0726] a is an integer of 2 or 3; and
[0727] c and d are independently integers of 1 to 6; or

[chemical structure]

[0728] wherein:
[0729] A₁ is hydrogen, or a suitable hydroxy protecting group;
[0730] a is an integer of 2 or 3; and
[0731] e is an integer of 2 to 10.

[0732] In some embodiments, the moiety:

[chemical structure]

[0733] as depicted in Formula (I) is Formula (VIa*):

[chemical structure]

[0734] wherein:
[0735] A₁ is hydrogen, or a suitable hydroxy protecting group;
[0736] a is 3; and
[0737] b is an integer of 3.

[0738] In some embodiments, the moiety:

[chemical structure]

[0739] as depicted in Formula (I) as described anywhere herein is Formula (VII*):

[chemical structure]

[0740] wherein:
[0741] A₁ is hydrogen;
[0742] a is an integer of 2 or 3.

[0743] In some embodiments, a=2. In some embodiments, a=3. In some embodiments, b=3.

### Vector and Cell

[0744] In one aspect, the invention provides a cell containing a nucleic acid, such as inhibitory RNA [RNAi] as described herein.

[0745] In one aspect, the invention provides a cell comprising a vector as described herein.

[0746] In one aspect the invention provides a vector comprising an oligonucleotide inhibitor, e.g. an iRNA e.g. siRNA.

### Pharmaceutically Acceptable Compositions

[0747] In one aspect, the invention provides a pharmaceutical composition for inhibiting expression of a target gene, the composition comprising an inhibitor such as an oligomer such as a nucleic acid as disclosed herein.

[0748] The pharmaceutically acceptable composition may comprise an excipient and or carrier.

[0749] Some examples of materials which can serve as pharmaceutically-acceptable carriers include: (1) sugars, such as lactose, glucose and sucrose; (2) starches, such as corn starch and potato starch; (3) cellulose, and its derivatives, such as sodium carboxymethyl cellulose, ethyl cellulose and cellulose acetate; (4) powdered tragacanth; (5) malt; (6) gelatin; (7) lubricating agents, such as magnesium stearate, sodium lauryl sulfate and talc; (8) excipients, such as cocoa butter and suppository waxes; (9) oils, such as peanut oil, cottonseed oil, safflower oil, sesame oil, olive oil, corn oil and soybean oil; (10) glycols, such as propylene glycol; (11) polyols, such as glycerin, sorbitol, mannitol and polyethylene glycol; (12) esters, such as ethyl oleate and ethyl laurate; (13) agar; (14) buffering agents, such as magnesium hydroxide and aluminum hydroxide; (15) alginic acid; (16) pyrogen-free water; (17) isotonic saline; (18) Ringer's solution; (19) ethyl alcohol; (20) pH buffered solutions; (21) polyesters, polycarbonates and/or poly anhydrides; (22) bulking agents, such as polypeptides and amino acids (23) serum component, such as serum albumin, HDL and LDL; and (22) other non-toxic compatible substances employed in pharmaceutical formulations.

[0750] Typical pharmaceutical carriers include, but are not limited to, binding agents (e.g., pregelatinized maize starch, polyvinylpyrrolidone or hydroxypropyl methylcellulose, etc.); fillers (e.g., lactose and other sugars, microcrystalline cellulose, pectin, gelatin, calcium sulfate, ethyl cellulose, polyacrylates or calcium hydrogen phosphate, etc.); lubricants (e.g., magnesium stearate, talc, silica, colloidal silicon dioxide, stearic acid, metallic stearates, hydrogenated vegetable oils, corn starch, polyethylene glycols, sodium benzoate, sodium acetate, etc.); disintegrants (e.g., starch, sodium starch glycolate, etc.); and wetting agents (e.g., sodium lauryl sulphate, etc).

[0751] Pharmaceutically acceptable organic or inorganic excipients suitable for non-parenteral administration which do not deleteriously react with nucleic acids can also be used to formulate the compositions of the present invention. Suitable pharmaceutically acceptable excipients include, but are not limited to, water, salt solutions, alcohols, polyethylene glycols, gelatin, lactose, amylose, magnesium stearate, talc, silicic acid, viscous paraffin, hydroxymethylcellulose, polyvinylpyrrolidone, and the like.

[0752] Formulations for topical administration of nucleic acids can include sterile and non-sterile aqueous solutions, non-aqueous solutions in common solvents such as alcohols, or solutions of the nucleic acids in liquid or solid oil bases. The solutions can also contain buffers, diluents and other suitable additives. Pharmaceutically acceptable organic or inorganic excipients suitable for non-parenteral administration which do not deleteriously react with nucleic acids can be used.

[0753] In one embodiment, the nucleic acid or composition is administered in an unbuffered solution. In certain embodiments, the unbuffered solution is saline or water. In other embodiments, the nucleic acid e.g. RNAi agent is administered in a buffered solution. In such embodiments, the buffer solution can comprise acetate, citrate, prolamine, carbonate, or phosphate, or any combination thereof. For example, the buffer solution can be phosphate buffered saline (PBS).

### Dosages

[0754] The pharmaceutical compositions of the invention may be administered in dosages sufficient to inhibit expression of a gene or modify the expression or function of a target. In general, where the composition comprising a nucleic acid, a suitable dose of a nucleic acid e.g. an siRNA of the invention will be in the range of about 0.001 to about 200.0 milligrams per kilogram body weight of the recipient per day, generally in the range of about 1 to 50 mg per kilogram body weight per day. Typically, a suitable dose of a nucleic acid e.g. an siRNA of the invention will be in the range of about 0.1 mg/kg to about 5.0 mg/kg, e.g., about 0.3 mg/kg and about 3.0 mg/kg.

[0755] A repeat-dose regimen may include administration of a therapeutic amount of a nucleic acid e.g. siRNA on a regular basis, such as every other day or once a year. In certain embodiments, the nucleic acid e.g. siRNA is administered about once per month to about once per quarter (i.e., about once every three months).

[0756] In various embodiments, the nucleic acid e.g. siRNA agent is administered at a dose of about 0.01 mg/kg to about 10 mg/kg or about 0.5 mg/kg to about 50 mg/kg. In some embodiments, the nucleic acid e.g. siRNA agent is administered at a dose of about 10 mg/kg to about 30 mg/kg. In certain embodiments, the nucleic acid e.g. siRNA agent is administered at a dose selected from about 0.5 mg/kg 1 mg/kg, 1.5 mg/kg, 3 mg/kg, 5 mg/kg, 10 mg/kg, and 30 mg/kg. In certain embodiments, the nucleic acid e.g. siRNA agent is administered about once per week, once per month, once every other two months, or once a quarter (i.e., once every three months) at a dose of about 0.1 mg/kg to about 5.0 mg/kg. In certain embodiments, the nucleic acid e.g. siRNA agent is administered to the subject once a week. In certain embodiments, the nucleic acid e.g. siRNA agent is administered to the subject once a month. In certain embodiments, the nucleic acid e.g. siRNA agent is administered once per quarter (i.e., every three months).

[0757] After an initial treatment regimen, the treatments can be administered on a less frequent basis. For example, after administration weekly or biweekly for three months, administration can be repeated once per month, for six months, or a year; or longer.

[0758] The pharmaceutical composition can be administered once daily, or administered as two, three, or more sub-doses at appropriate intervals throughout the day or even using continuous infusion or delivery through a controlled release formulation. In that case, the nucleic acid e.g. siRNA contained in each sub-dose must be correspondingly smaller in order to achieve the total daily dosage. The dosage unit can also be compounded for delivery over several days, e.g., using a conventional sustained release formulation which provides sustained release of the nucleic acid e.g. siRNA over a several day period. Sustained release formulations are well known in the art and are particularly useful for delivery of agents at a particular site, such as could be used with the agents of the present invention. In this embodiment, the dosage unit contains a corresponding multiple of the daily dose.

[0759] In other embodiments, a single dose of the pharmaceutical compositions can be long lasting, such that subsequent doses are administered at not more than 3, 4, or 5 day intervals, or at not more than 1, 2, 3, or 4 week intervals. In some embodiments of the invention, a single dose of the pharmaceutical compositions of the invention is administered once per week. In other embodiments of the invention, a single dose of the pharmaceutical compositions of the invention is administered bimonthly. In certain embodiments, the siRNA is administered about once per month to about once per quarter (i.e., about once every three months), or even every 6 months or 12 months.

[0760] Estimates of effective dosages and in vivo half-lives for the individual nucleic acid e.g. siRNAs encompassed by the invention can be made using conventional methodologies or on the basis of in vivo testing using an appropriate animal model, as known in the art.

[0761] The pharmaceutical compositions of the present invention can be administered in a number of ways depending upon whether local or systemic treatment is desired and upon the area to be treated. Administration can be topical (e.g., by a transdermal patch), pulmonary, e.g., by inhalation or insufflation of powders or aerosols, including by nebulizer; intratracheal, intranasal, epidermal and transdermal, oral or parenteral. Parenteral administration includes intravenous, intraarterial, subcutaneous, intraperitoneal, or intramuscular injection or infusion; subdermal, e.g., via an implanted device; or intracranial, e.g., by intraparenchymal, intrathecal or intraventricular administration. In certain preferred embodiments, the compositions are administered by intravenous infusion or injection. In certain embodiments, the compositions are administered by subcutaneous injection.

[0762] In one embodiment, the nucleic acid e.g. siRNA agent is administered to the subject subcutaneously.

[0763] The inhibitor e.g. nucleic acid e.g. siRNA can be delivered in a manner to target a particular tissue (e.g. in particular liver cells).

### Methods for Inhibiting Gene Expression or Inhibition of Target Expression or Function

[0764] The present invention also provides methods of inhibiting expression of a gene in a cell and methods for inhibiting expression and/or function of other target molecules. The methods include contacting a cell with a nucleic acid of the invention e.g. siRNA agent, such as double stranded siRNA in an amount effective to inhibit expression of the gene in the cell, thereby inhibiting expression of the gene in the cell. In a preferred embodiment, the gene is ZPI.

[0765] Contacting of a cell with the inhibitor e.g. the nucleic acid e.g. an siRNA, such as a double stranded siRNA agent, may be done in vitro or in vivo. Contacting a cell in vivo with the inhibitor nucleic acid e.g. siRNA includes contacting a cell or group of cells within a subject, e.g., a human subject, with the nucleic acid e.g. siRNA. Combinations of in vitro and in vivo methods of contacting a cell are also possible. Contacting a cell may be direct or indirect, as discussed above. Furthermore, contacting a cell may be accomplished via a targeting ligand moiety, including any ligand moiety described herein or known in the art. In preferred embodiments, the targeting ligand moiety is a carbohydrate moiety, e.g. a GalNAc3 ligand, or any other ligand moiety that directs the siRNA agent to a site of interest.

[0766] The term “inhibiting,” as used herein, is used interchangeably with “reducing,” “silencing,” “downregulating”, “suppressing”, and other similar terms, and includes any level of inhibition.

[0767] In some embodiments of the methods of the invention, expression or activity of a gene or an inhibition target is inhibited by at least 30%, 35%, 40%, 45%, 50%, 55%, 60%, 65%, 70%, 75%, 80%, 85%, 90%, or 95%, or to below the level of detection of the assay, preferably when determined by qPCR as described herein and/or when the siRNA is introduced into the target cell by transfection. In certain embodiments, the methods include a clinically relevant inhibition of expression of a target gene e.g. as demonstrated by a clinically relevant outcome after treatment of a subject with an agent to reduce the expression of the gene and/or activity of the target

[0768] In some embodiments, when transfected into the cells, the nucleic acid of the invention inhibits expression of the ZPI gene with an IC50 value lower than 2500 pM, 2400 pM, 2300 pM, 2200 pM, 2100 pM, 2000 pM, 1900 pM, 1800 pM, 1700 pM, 1600 pM, 1500 pM, 1400 pM, 1300 pM, 1200 pM, 1100 pM, 1000 pM, 900 pM, 800 pM, 700 pM, 600 pM, 500 pM, 400 pM, 300 pM, 200 pM or 100 pM, preferably when determined by qPCR, more preferably by reverse transcriptase (RT)-qPCR, as described herein.

[0769] In a preferred embodiment, when transfected into the cells, the nucleic acid of the invention inhibits expression of the ZPI gene with an IC50 value lower than 2500 pM. In a more preferred embodiment, when transfected into the cells, the nucleic acid of the invention inhibits expression of the ZPI gene with an IC50 value lower than 1000 pM. In an even more preferred embodiment, when transfected into the cells, the nucleic acid of the invention inhibits expression of the ZPI gene with an IC50 value lower than 500 pM. In a most preferred embodiment, when transfected into the cells, the nucleic acid of the invention inhibits expression of the ZPI gene with an IC50 value lower than 100 pM.

[0770] Inhibition of expression of the ZPI gene may be quantified by the following method:

[0771] Huh7 cells (human hepatocyte-derived cell line, obtained from JCRB Cell Bank) may be maintained in Dulbecco's Modified Eagle Medium (DMEM) supplemented with 10% FBS at 37° C. in an atmosphere of 5% CO2. Cells may then be transfected with siRNA duplexes targeting ZPI mRNA or a negative control siRNA (siRNA-control; sense strand 5′-UUCUCCGAACGUGUCACGUTT-3′ (SEQ ID NO:794), antisense strand 5′-ACGUGACACGUUCGGAGAATT-3′ (SEQ ID NO:790)) using 10×3-fold serial dilutions over a final duplex concentration range of 20 nM to 1 pM. Transfection may be carried out by adding 9.7 μL Opti-MEM (ThermoFisher) plus 0.3 μL Lipofectamine RNAiMAX (ThermoFisher) to 10 μL of each siRNA duplex. The mixture may be incubated at room temperature for 15 minutes before being added to 100 μL of complete growth medium containing 20,000 Huh7 cells. Cells may be incubated for 24 hours at 37° C./5% CO2 prior to total RNA purification using a RNeasy 96 Kit (Qiagen). Each duplex may be tested by transfection in duplicate wells in a single experiment.

[0772] cDNA synthesis may be performed using FastQuant RT (with gDNase) Kit (Tiangen). Real-time quantitative PCR (qPCR) may be performed on an ABI Prism 7900HT or ABI QuantStudio 7 with primers specific for human ZPI (Hs01547819_ml) and human GAPDH (Hs02786624_g1) using FastStart Universal Probe Master Kit (Roche).

[0773] qPCR may be performed in duplicate on cDNA derived from each well and the mean cycle threshold (Ct) calculated. Relative ZPI expression may be calculated from mean Ct values using the comparative Ct (ΔΔCt) method, normalised to GAPDH and relative to untreated cells. Maximum percent inhibition of ZPI expression and IC50 values may be calculated using a four parameter (variable slope) model using GraphPad Prism 9.

[0774] Alternatively or in addition, inhibition of expression of the ZPI gene may be characterized by a reduction of mean relative expression of the ZPI gene.

[0775] In some embodiments, when cells are transfected with 0.1 nM of the nucleic acid of the invention, the mean relative expression of ZPI is below 1, 0.9, 0.8, 0.7, 0.6, 0.5, or 0.4, preferably when determined by qPCR, more preferably by reverse transcriptase (RT)-qPCR, as described herein.

[0776] In some embodiments, when cells are transfected with 5 nM of the nucleic acid of the invention, the mean relative expression of ZPI is below 1, 0.9, 0.8, 0.7, 0.6, 0.5, 0.4 or 0.3, preferably when determined by qPCR, more preferably by reverse transcriptase (RT)-qPCR, as described herein.

[0777] Mean relative expression of the ZPI gene may be quantified by the following method:

[0778] Huh7 cells (human hepatocyte-derived cell line, obtained from JCRB Cell Bank) may be maintained in Dulbecco's Modified Eagle Medium (DMEM) supplemented with 10% FBS at 37° C. in at atmosphere of 5% CO₂. Cells may be transfected with siRNA duplexes targeting ZPI mRNA or a negative control siRNA (siRNA-control; sense strand 5′-UUCUCCGAACGUGUCACGUTT-3′ (SEQ ID NO:794), antisense strand 5′-ACGUGACACGUUCGGAGAATT-3′ (SEQ ID NO:790)) at a final duplex concentration of 5 nM and 0.1 nM. Transfection may be carried out by adding 9.7 μL Opti-MEM (ThermoFisher) plus 0.3 μL Lipofectamine RNAiMAX (ThermoFisher) to 10 μL of each siRNA duplex. The mixture may be incubated at room temperature for 15 minutes before being added to 100 μL of complete growth medium containing 20,000 Huh7 cells. Cells may be incubated for 24 hours at 37° C./5% CO₂ prior to total RNA purification using a RNeasy 96 Kit (Qiagen). Each duplex may be tested by transfection in duplicate wells in two independent experiments.

[0779] cDNA synthesis may be performed using FastQuant RT (with gDNase) Kit (Tiangen). Real-time quantitative PCR (qPCR) may be performed on an ABI Prism 7900HT or ABI QuantStudio 7 with primers specific for human ZPI (Hs01547819_m1) and human GAPDH (Hs02786624_g1) using FastStart Universal Probe Master Kit (Roche).

[0780] qPCR may be performed in duplicate on cDNA derived from each well and the mean Ct calculated. Relative ZPI expression may be calculated from mean Ct values using the comparative Ct (ΔΔCt) method, normalised to GAPDH and relative to untreated cells.

[0781] Inhibition of the expression of a gene may be manifested by a reduction of the amount of mRNA of the target gene of interest in comparison to a suitable control. Inhibition of the function of a target may be manifested by a reduction of the activity of the target in comparison to a suitable control.

[0782] In other embodiments, inhibition of the expression of a gene or other target may be assessed in terms of a reduction of a parameter that is functionally linked to gene expression, e.g, protein expression or signalling pathways.

Methods of Treating or Preventing Diseases Associated with Gene Expression/Expression of Function of a Target.

[0783] The present invention also provides methods of using nucleic acid e.g. an siRNA of the invention or a composition containing nucleic acid e.g. an siRNA of the invention to reduce or inhibit gene expression in a cell or reduce expression or function of a target. The methods include contacting the cell with a nucleic acid e.g. dsiRNA of the invention and maintaining the cell for a time sufficient to obtain degradation of the mRNA transcript of a gene, thereby inhibiting expression of the gene in the cell. Reduction in gene expression or function of a target can be assessed by any methods known in the art. In a preferred embodiment, the gene is ZPI.

[0784] In the methods of the invention the cell may be contacted in vitro or in vivo, i.e., the cell may be within a subject.

[0785] A cell suitable for treatment using the methods of the invention may be any cell that expresses a gene of interest or target of interest associated with disease.

[0786] The in vivo methods of the invention may include administering to a subject a composition containing a nucleic acid of the invention e.g. an iRNA, where the nucleic acid e.g. siRNA includes a nucleoside sequence that is complementary to at least a part of an RNA transcript of the gene of the mammal to be treated, or complementary to another nucleic acid the expression and/or function of which is associated with diseases.

[0787] The present invention further provides methods of treatment of a subject in need thereof. The treatment methods of the invention include administering a nucleic acid such as an siRNA of the invention to a subject, e.g., a subject that would benefit from a reduction or inhibition of the expression of a gene and/or expression and/or function of a target, in a therapeutically effective amount e.g. a nucleic acid such as an siRNA targeting a gene or a pharmaceutical composition comprising the nucleic acid targeting a gene.

[0788] A nucleic acid e.g. siRNA of the invention may be administered as a “free” nucleic acid or “free” siRNA, administered in the absence of a pharmaceutical composition. The naked nucleic acid may be in a suitable buffer solution. The buffer solution may comprise acetate, citrate, prolamine, carbonate, or phosphate, or any combination thereof. In one embodiment, the buffer solution is phosphate buffered saline (PBS). The pH and osmolarity of the buffer solution can be adjusted such that it is suitable for administering to a subject.

[0789] Alternatively, a nucleic acid e.g. siRNA of the invention may be administered as a pharmaceutical composition, such as a dsiRNA liposomal formulation.

[0790] In one embodiment, the method includes administering a composition featured herein such that expression of the target gene is decreased, such as for about 1, 2, 3, 4, 5, 6, 7, 8, 12, 16, 18, 24 hours, 28, 32, or about 36 hours. In one embodiment, expression of the target gene is decreased for an extended duration, e.g., at least about two, three, four days or more, e.g., about one week, two weeks, three weeks, or four weeks or longer, e.g., about 1 month, 2 months, or 3 months.

[0791] Subjects can be administered a therapeutic amount of nucleic acid e.g. siRNA, such as about 0.01 mg/kg to about 200 mg/kg.

[0792] The nucleic acid e.g. siRNA can be administered by intravenous infusion over a period of time, on a regular basis. In certain embodiments, after an initial treatment regimen, the treatments can be administered on a less frequent basis. Administration of the siRNA can reduce gene product levels of a target gene, e.g., in a cell or tissue of the patient by at least about 20%, 25%, 30%, 35%, 40%, 45%, 50%, 55%, 60%, 65%, 70%, 75%, 80%, 85%, 90%, or 95%, or below the level of detection of the assay method used. In certain embodiments, administration results in clinical stabilization or preferably clinically relevant reduction of at least one sign or symptom of a gene-associated disorder.

[0793] Alternatively, the nucleic acid e.g. siRNA can be administered subcutaneously, i.e., by subcutaneous injection. One or more injections may be used to deliver the desired daily dose of nucleic acid e.g. s iRNA to a subject. The injections may be repeated over a period of time. The administration may be repeated on a regular basis. In certain embodiments, after an initial treatment regimen, the treatments can be administered on a less frequent basis. A repeat-dose regimen may include administration of a therapeutic amount of nucleic acid on a regular basis, such as every other day or to once a year. In certain embodiments, the nucleic acid is administered about once per month to about once per quarter (i.e., about once every three months).

[0794] In one aspect the present invention may be applied in the compounds, processes, compositions or uses of the following Sentences numbered 1-101 (wherein reference to any Formula in the Sentences 1-101 refers only to those Formulas that are defined within Sentences 1-101. These formulae are reproduced in FIG. 6)
[0795] 1. A compound comprising the following structure:

[chemical structure]

[0796] wherein:
[0797] R₁ at each occurrence is independently selected from the group consisting of hydrogen, methyl and ethyl;
[0798] R₂ is selected from the group consisting of hydrogen, hydroxy, —OC₁₋₃alkyl, —C(═O)OC₁₋₃alkyl, halo and nitro;
[0799] X₁ and X₂ at each occurrence are independently selected from the group consisting of methylene, oxygen and sulfur;
[0800] m is an integer of from 1 to 6;
[0801] n is an integer of from 1 to 10;
[0802] q, r, s, t, v are independently integers from 0 to 4, with the proviso that:
[0803] (i) q and r cannot both be 0 at the same time; and
[0804] (ii) s, t and v cannot all be 0 at the same time;
[0805] Z is an oligonucleoside moiety.
[0806] 2. A compound according to Sentence 1, wherein R₁ is hydrogen at each occurrence.
[0807] 3. A compound according to Sentence 1, wherein R₁ is methyl.
[0808] 4. A compound according to Sentence 1, wherein R₁ is ethyl.
[0809] 5. A compound according to any of Sentences 1 to 4, wherein R₂ is hydroxy.
[0810] 6. A compound according to any of Sentences 1 to 4, wherein R₂ is halo.
[0811] 7. A compound according to Sentence 6, wherein R₂ is fluoro.
[0812] 8. A compound according to Sentence 6, wherein R₂ is chloro.
[0813] 9. A compound according to Sentence 6, wherein R₂ is bromo.
[0814] 10. A compound according to Sentence 6, wherein R₂ is iodo.
[0815] 11. A compound according to Sentence 6, wherein R₂ is nitro.
[0816] 12. A compound according to any of Sentences 1 to 11, wherein X₁ is methylene.
[0817] 13. A compound according to any of Sentences 1 to 11, wherein X₁ is oxygen.
[0818] 14. A compound according to any of Sentences 1 to 11, wherein X₁ is sulfur.
[0819] 15. A compound according to any of Sentences 1 to 14, wherein X₂ is methylene.
[0820] 16. A compound according to any of Sentences 1 to 15, wherein X₂ is oxygen.
[0821] 17. A compound according to any of Sentences 1 to 16, wherein X₂ is sulfur.
[0822] 18. A compound according to any of Sentences 1 to 17, wherein m=3.
[0823] 19. A compound according to any of Sentences 1 to 18, wherein n=6.
[0824] 20. A compound according to Sentences 13 and 15, wherein X₁ is oxygen and X₂ is methylene, and preferably wherein:
   [0825] q=1,
   [0826] r=2,
   [0827] s=1,
   [0828] t=1,
   [0829] v=1.
[0830] 21. A compound according to Sentences 12 and 15, wherein both Xi and X₂ are methylene, and preferably wherein:
   [0831] q=1,
   [0832] r=3,
   [0833] s=1,
   [0834] t=1,
   [0835] v=1.
[0836] 22. A compound according to any of Sentences 1 to 21, wherein Z is:

[chemical structure]

[0837] wherein:
[0838] Z₁, Z₂, Z₃, Z₄ are independently at each occurrence oxygen or sulfur; and
[0839] one the bonds between P and Z₂, and P and Z₃ is a single bond and the other bond is a double bond.
[0840] 23. A compound according to Sentence 22, wherein said oligonucleoside is an RNA compound capable of modulating, preferably inhibiting, expression of a target gene.
[0841] 24. A compound according to Sentence 23, wherein said RNA compound comprises an RNA duplex comprising first and second strands, wherein the first strand is at least partially complementary to an RNA sequence of a target gene, and the second strand is at least partially complementary to said first strand, and wherein each of the first and second strands have 5′ and 3′ ends.
[0842] 25. A compound according to Sentence 24, wherein the RNA compound is attached at the 5′ end of its second strand to the adjacent phosphate.
[0843] 26. A compound according to Sentence 24, wherein the RNA compound is attached at the 3′ end of its second strand to the adjacent phosphate.
[0844] 27. A compound of Formula (II):

[chemical structure]

[0845] 28. A compound of Formula (III):

[chemical structure]

[0846] 29. A compound according to Sentence 27 or 28, wherein the oligonucleoside comprises an RNA duplex comprising first and second strands, wherein the first strand is at least partially complementary to an RNA sequence of a target gene, and the second strand is at least partially complementary to said first strand, and wherein each of the first and second strands have 5′ and 3′ ends, and wherein said RNA duplex is attached at the 5′ end of its second strand to the adjacent phosphate.
[0847] 30. A composition comprising a compound of Formula (II) as defined in Sentence 27, and a compound of Formula (III) as defined in Sentence 28, optionally dependent on Sentence 29.
[0848] 31. A composition according to Sentence 30, wherein said compound of Formula (III) as defined in Sentence 28 is present in an amount in the range of 10 to 15% by weight of said composition.
[0849] 32. A compound of Formula (IV):

[chemical structure]

[0850] 33. A compound of Formula (V):

[chemical structure]

[0851] 34. A compound according to Sentence 32 or 33, wherein the oligonucleoside comprises an RNA duplex comprising first and second strands, wherein the first strand is at least partially complementary to an RNA sequence of a target gene, and the second strand is at least partially complementary to said first strand, and wherein each of the first and second strands have 5′ and 3′ ends, and wherein said RNA duplex is attached at the 3′ end of its second strand to the adjacent phosphate.
[0852] 35. A composition comprising a compound of Formula (IV) as defined in Sentence 32, and a compound of Formula (V) as defined in Sentence 33, optionally dependent on Sentence 34.
[0853] 36. A composition according to Sentence 35, wherein said compound of Formula (V) as defined in Sentence 33 is present in an amount in the range of 10 to 15% by weight of said composition.
[0854] 37. A compound as defined in any of Sentences 1 to 29, or 32 to 34, wherein the oligonucleoside comprises an RNA duplex which further comprises one or more riboses modified at the 2′ position, preferably a plurality of riboses modified at the 2′ position.
[0855] 38. A compound according to Sentence 37, wherein the modifications are chosen from 2′-O-methyl, 2′-deoxy-fluoro, and 2′-deoxy.
[0856] 39. A compound according to any of Sentences 1 to 29, or 32 to 34, or 37 to 38, wherein the oligonucleoside further comprises one or more degradation protective moieties at one or more ends.
[0857] 40. A compound according to Sentence 39, wherein said one or more degradation protective moieties are not present at the end of the oligonucleoside strand that carries the ligand moieties, and/or wherein said one or more degradation protective moieties is selected from phosphorothioate internucleoside linkages, phosphorodithioate internucleoside linkages and inverted abasic nucleosides, wherein said inverted abasic nucleosides are present at the distal end of the strand that carries the ligand moieties.
[0858] 41. A compound according to any of Sentences 1 to 29, or 32 to 34, or 37 to 40, wherein said ligand moiety as depicted in Formula (I) in Sentence 1 comprises one or more ligands.
[0859] 42. A compound according to Sentence 41, wherein said ligand moiety as depicted in Formula (I) in Sentence 1 comprises one or more carbohydrate ligands.
[0860] 43. A compound according to Sentence 42, wherein said one or more carbohydrates can be a monosaccharide, disaccharide, trisaccharide, tetrasaccharide, oligosaccharide or polysaccharide.
[0861] 44. A compound according to Sentence 43, wherein said one or more carbohydrates comprise one or more galactose moieties, one or more lactose moieties, one or more N-AcetylGalactosamine moieties, and/or one or more mannose moieties.
[0862] 45. A compound according to Sentence 44, wherein said one or more carbohydrates comprise one or more N-Acetyl-Galactosamine moieties.
[0863] 46. A compound according to Sentence 45, which comprises two or three N-AcetylGalactosamine moieties.
[0864] 47. A compound according to any of Sentences 41 to 46, wherein said one or more ligands are attached in a linear configuration, or in a branched configuration.
[0865] 48. A compound according to Sentence 47, wherein said one or more ligands are attached as a biantennary or triantennary branched configuration.
[0866] 49. A compound according to Sentences 46 to 48, wherein said moiety:

[chemical structure]

[0867] as depicted in Formula (I) in Sentence 1 is any of Formulae (VIa), (VIb) or (VIc), preferably Formula (VIa):

[chemical structure]

[0868] wherein:
[0869] A₁ is hydrogen, or a suitable hydroxy protecting group;
[0870] a is an integer of 2 or 3; and
[0871] b is an integer of 2 to 5; or

[chemical structure]

[0872] wherein:
[0873] A₁ is hydrogen, or a suitable hydroxy protecting group;
[0874] a is an integer of 2 or 3; and
[0875] c and d are independently integers of 1 to 6; or

[chemical structure]

[0876] wherein:
[0877] A₁ is hydrogen, or a suitable hydroxy protecting group;
[0878] a is an integer of 2 or 3; and
[0879] e is an integer of 2 to 10.
[0880] 50. A compound according to Sentences 46 to 48, wherein said moiety:

[chemical structure]

[0881] as depicted in Formula (I) in Sentence 1 is Formula (VII):

[chemical structure]

[0882] wherein:
[0883] A₁ is hydrogen;
[0884] a is an integer of 2 or 3.
[0885] 51. A compound according to Sentence 49 or 50, wherein a=2.
[0886] 52. A compound according to Sentence 49 or 50, wherein a=3.
[0887] 53. A compound according to Sentence 49, wherein b=3.
[0888] 54. A compound of Formula (VIII):

[chemical structure]

[0889] 55. A compound of Formula (IX):

[chemical structure]

[0890] 56. A compound according to Sentence 54 or 55, wherein the oligonucleoside comprises an RNA duplex comprising first and second strands, wherein the first strand is at least partially complementary to an RNA sequence of a target gene, and the second strand is at least partially complementary to said first strand, and wherein each of the first and second strands have 5′ and 3′ ends, and wherein said RNA duplex is attached at the 5′ end of its second strand to the adjacent phosphate.
[0891] 57. A composition comprising a compound of Formula (VIII) as defined in Sentence 54, and a compound of Formula (IX) as defined in Sentence 55, optionally dependent on Sentence 56.
[0892] 58. A composition according to Sentence 57, wherein said compound of Formula (IX) as defined in Sentence 55 is present in an amount in the range of 10 to 15% by weight of said composition.
[0893] 59. A compound of Formula (X):

[chemical structure]

[0894] 60. A compound of formula (XI):

[chemical structure]

[0895] 61. A compound according to Sentence 59 or 60, wherein the oligonucleoside comprises an RNA duplex comprising first and second strands, wherein the first strand is at least partially complementary to an RNA sequence of a target gene, and the second strand is at least partially complementary to said first strand, and wherein each of the first and second strands have 5′ and 3′ ends, and wherein said RNA duplex is attached at the 3′ end of its second strand to the adjacent phosphate.
[0896] 62. A composition comprising a compound of Formula (X) as defined in Sentence 59, and a compound of Formula (XI) as defined in Sentence 60, optionally dependent on Sentence 61.
[0897] 63. A composition according to Sentence 62, wherein said compound of Formula (XI) as defined in Sentence 60 is present in an amount in the range of 10 to 15% by weight of said composition.
[0898] 64. A compound as defined in any of Sentences 54 to 63, wherein the oligonucleoside comprises an RNA duplex which further comprises one or more riboses modified at the 2′ position, preferably a plurality of riboses modified at the 2′ position.
[0899] 65. A compound according to Sentence 64, wherein the modifications are chosen from 2′-O-methyl, 2′-deoxy-fluoro, and 2′-deoxy.
[0900] 66. A compound according to any of Sentences 54 to 65, wherein the oligonucleoside further comprises one or more degradation protective moieties at one or more ends.
[0901] 67. A compound according to Sentence 66, wherein said one or more degradation protective moieties are not present at the end of the oligonucleoside strand that carries the ligand moieties, and/or wherein said one or more degradation protective moieties is selected from phosphorothioate internucleoside linkages, phosphorodithioate internucleoside linkages and inverted abasic nucleosides, wherein said inverted abasic nucleosides are present at the distal end of the strand that carries the ligand moieties, as shown in any of Formulae (VIII), (IX), (X) or (XI) in any of Sentences 54, 55, 59 or 60.
[0902] 68. A process of preparing a compound according to any of Sentences 1 to 29, 32 to 34, 37 to 56, 59 to 61, and 64 to 67, and/or a composition according to any of Sentences 30, 31, 35, 36, 57, 58, 62, 63, which comprises reacting compounds of Formulae (XII) and (XIII):

[chemical structure]

[0903] herein:
[0904] R₁ at each occurrence is independently selected from the group consisting of hydrogen, methyl and ethyl;
[0905] R₂ is selected from the group consisting of hydrogen, hydroxy, —OC₁₋₃alkyl, —C(═O)OC₁₋₃alkyl, halo and nitro;
[0906] X₁ and X₂ at each occurrence are independently selected from the group consisting of methylene, oxygen and sulfur;
[0907] m is an integer of from 1 to 6;
[0908] n is an integer of from 1 to 10;
[0909] q, r, s, t, v are independently integers from 0 to 4, with the proviso that:
[0910] (i) q and r cannot both be 0 at the same time; and
[0911] (ii) s, t and v cannot all be 0 at the same time;
[0912] Z is an oligonucleoside moiety;
[0913] and where appropriate carrying out deprotection of the ligand and/or annealing of a second strand for the oligonucleoside moiety.
[0914] 69. A process according to Sentence 68, wherein a compound of Formula (XII) is prepared by reacting compounds of Formulae (XIV) and (XV):

[chemical structure]

[0915] R₁ at each occurrence is independently selected from the group consisting of hydrogen, methyl and ethyl;
[0916] R₂ is selected from the group consisting of hydrogen, hydroxy, —OC₁₋₃alkyl, —C(═O)OC₁₋₃alkyl, halo and nitro;
[0917] X₁ and X₂ at each occurrence are independently selected from the group consisting of methylene, oxygen and sulfur;
[0918] q, r, s, t, v are independently integers from 0 to 4, with the proviso that:
[0919] (i) q and r cannot both be 0 at the same time; and
[0920] (ii) s, t and v cannot all be 0 at the same time;
[0921] Z is an oligonucleoside moiety.
[0922] 70. A process according to Sentence 68, to prepare a compound according to any of Sentences 20, 25, 27, 29, 54, 56, and/or a composition according to any of Sentences 30, 31, 57, 58, wherein:
[0923] compound of Formula (XII) is Formula (XIIa):

[chemical structure]

[0924] and compound of Formula (XIII) is Formula (XIIIa):

[chemical structure]

[0925] wherein the oligonucleoside comprises an RNA duplex comprising first and second strands, wherein the first strand is at least partially complementary to an RNA sequence of a target gene, and the second strand is at least partially complementary to said first strand, and wherein each of the first and second strands have 5′ and 3′ ends, and wherein said RNA duplex is attached at the 5′ end of its second strand to the adjacent phosphate.
[0926] 71. A process according to Sentence 68, to prepare a compound according to any of Sentences 20, 25, 28, 29, 55, 56, and/or a composition according to any of Sentences 30, 31, 57, 58, wherein:
[0927] compound of Formula (XII) is Formula (XIIb):

[chemical structure]

[0928] and compound of Formula (XIII) is Formula (XIIIa):

[chemical structure]

[0929] wherein the oligonucleoside comprises an RNA duplex comprising first and second strands, wherein the first strand is at least partially complementary to an RNA sequence of a target gene, and the second strand is at least partially complementary to said first strand, and wherein each of the first and second strands have 5′ and 3′ ends, and wherein said RNA duplex is attached at the 5′ end of its second strand to the adjacent phosphate.
[0930] 72. A process according to Sentence 68, to prepare a compound according to any of Sentences 21, 26, 32, 34, 59, 61, and/or a composition according to any of Sentences 35, 36, 62, 63, wherein:
[0931] compound of Formula (XII) is Formula (XIIc):

[chemical structure]

and compound of Formula (XIII) is Formula (XIIIa):

[chemical structure]

[0932] wherein the oligonucleoside comprises an RNA duplex comprising first and second strands, wherein the first strand is at least partially complementary to an RNA sequence of a target gene, and the second strand is at least partially complementary to said first strand, and wherein each of the first and second strands have 5′ and 3′ ends, and wherein said RNA duplex is attached at the 3′ end of its second strand to the adjacent phosphate.
[0933] 73. A process according to Sentence 68, to prepare a compound according to any of Sentences 21, 26, 33, 34, 60, 61, and/or a composition according to any of Sentences 35, 36, 62, 63, wherein:
[0934] compound of Formula (XII) is Formula (XIId):

[chemical structure]

[0935] and compound of Formula (XIII) is Formula (XIIIa):

[chemical structure]

[0936] wherein the oligonucleoside comprises an RNA duplex comprising first and second strands, wherein the first strand is at least partially complementary to an RNA sequence of a target gene, and the second strand is at least partially complementary to said first strand, and wherein each of the first and second strands have 5′ and 3′ ends, and wherein said RNA duplex is attached at the 3′ end of its second strand to the adjacent phosphate.
[0937] 74. A process according to any of Sentences 70 to 73, wherein:
[0938] compound of Formula (XIIIa) is Formula (XIIIb):

[chemical structure]

[0939] 75. A process according to Sentences 69, as dependent on Sentences 70 to 73, wherein: compound of Formula (XIV) is either Formula (XIVa) or Formula (XIVb):

[chemical structure]

[0940] and compound of Formula (XV) is either Formula (XVa) or Formula (XIVb):

[chemical structure]

[0941] wherein the oligonucleoside comprises an RNA duplex comprising first and second strands, wherein the first strand is at least partially complementary to an RNA sequence of a target gene, and the second strand is at least partially complementary to said first strand, and wherein each of the first and second strands have 5′ and 3′ ends, and wherein (i) said RNA duplex is attached at the 5′ end of its second strand to the adjacent phosphate in Formula (XVa), or (ii) said RNA duplex is attached at the 3′ end of its second strand to the adjacent phosphate in Formula (XVb).
[0942] 76. A compound of Formula (XII):

[chemical structure]

[0943] wherein:
[0944] R₁ at each occurrence is independently selected from the group consisting of hydrogen, methyl and ethyl;
[0945] R₂ is selected from the group consisting of hydrogen, hydroxy, —OC₁₋₃alkyl, —C(═O)OC₁₋₃alkyl, halo and nitro;
[0946] X₁ and X₂ at each occurrence are independently selected from the group consisting of methylene, oxygen and sulfur;
[0947] q, r, s, t, v are independently integers from 0 to 4, with the proviso that:
[0948] (i) q and r cannot both be 0 at the same time; and
[0949] (ii) s, t and v cannot all be 0 at the same time;
[0950] Z is an oligonucleoside moiety.
[0951] 77. A compound of Formula (XIIa):

[chemical structure]

[0952] 78. A compound of Formula (XIIb):

[chemical structure]

[0953] 79. A compound of Formula (XIIc):

[chemical structure]

[0954] 80. A compound of Formula (XIId):

[chemical structure]

[0955] 81. A compound of Formula (XIII):

[chemical structure]

[0956] wherein:
[0957] R₁ at each occurrence is independently selected from the group consisting of hydrogen, methyl and ethyl;
[0958] m is an integer of from 1 to 6;
[0959] n is an integer of from 1 to 10.
[0960] 82. A compound of Formula (XIIIa):

[chemical structure]

[0961] 83. A compound of Formula (XIIIb):

[chemical structure]

[0962] 84. A compound of Formula (XIV):

[chemical structure]

[0963] wherein:
[0964] R₁ is selected from the group consisting of hydrogen, methyl and ethyl;
[0965] R₂ is selected from the group consisting of hydrogen, hydroxy, —OC₁₋₃alkyl, —C(═O)OC₁₋₃alkyl, halo and nitro;
[0966] X₂ is selected from the group consisting of methylene, oxygen and sulfur;
[0967] s, t, v are independently integers from 0 to 4, with the proviso that s, t and v cannot all be 0 at the same time.
[0968] 85. A compound of Formula (XIVa):

[chemical structure]

[0969] Formula (XIVa)
[0970] 86. A compound of Formula (XIVb):

[chemical structure]

[0971] 87. A compound of Formula (XV):

[chemical structure]

[0972] wherein:
[0973] R₁ at each occurrence is independently selected from the group consisting of hydrogen, methyl and ethyl;
[0974] X₁ is selected from the group consisting of methylene, oxygen and sulfur;
[0975] q and r are independently integers from 0 to 4, with the proviso that q and r cannot both be 0 at the same time;
[0976] Z is an oligonucleoside moiety.
[0977] 88. A compound of Formula (XVa):

[chemical structure]

[0978] 89. A compound of Formula (XVb):

[chemical structure]

[0979] 90. Use of a compound according to any of Sentences 76, 81 to 84, 87, for the preparation of a compound according to any of Sentences 1 to 29, 32 to 34, 37 to 56, 59 to 61, and 64 to 67, and/or a composition according to any of Sentences 30, 31, 35, 36, 57, 58, 62 and 63.
[0980] 91. Use of a compound according to Sentence 85, for the preparation of a compound according to any of Sentences 1 to 29, 32 to 34, 37 to 56, 59 to 61, and 64 to 67, and/or a composition according to any of Sentences 30, 31, 35, 36, 57, 58, 62 and 63, wherein R₂═F.
[0981] 92. Use of a compound according to Sentence 86, for the preparation of a compound according to any of Sentences 1 to 29, 32 to 34, 37 to 56, 59 to 61, and 64 to 67, and/or a composition according to any of Sentences 30, 31, 35, 36, 57, 58, 62 and 63, wherein R₂═OH.
[0982] 93. Use of a compound according to Sentence 77, for the preparation of a compound according to any of Sentences 20, 25, 27, 29, 54, 56, and/or a composition according to any of Sentences 30, 31, 57, 58.
[0983] 94. Use of a compound according to Sentence 78, for the preparation of a compound according to any of Sentences 20, 25, 28, 29, 55, 56, and/or a composition according to any of Sentences 30, 31, 57, 58.
[0984] 95. Use of a compound according to Sentence 79, for the preparation of a compound according to any of Sentences 21, 26, 32, 34, 59, 61, and/or a composition according to any of Sentences 35, 36, 62, 63.
[0985] 96. Use of a compound according to Sentence 80, for the preparation of a compound according to any of Sentences 21, 26, 33, 34, 60, 61, and/or a composition according to any of Sentences 35, 36, 62, 63.
[0986] 97. Use of a compound according to Sentence 88, for the preparation of a compound according to any of Sentences 20, 25, 27 to 29, 54 to 56, and/or a composition according to any of Sentences 30, 31, 57, 58.
[0987] 98. Use of a compound according to Sentence 89, for the preparation of a compound according to any of Sentences 21, 26, 32 to 34, 59 to 61, and/or a composition according to any of Sentences 35, 36, 62, 63.
[0988] 99. A compound or composition obtained, or obtainable by a process according to any of Sentences 68 to 75.
[0989] 100. A pharmaceutical composition comprising of a compound according to any of Sentences 1 to 29, 32 to 34, 37 to 56, 59 to 61, and 64 to 67, and/or a composition according to any of Sentences 30, 31, 35, 36, 57, 58, 62 and 63, together with a pharmaceutically acceptable carrier, diluent or excipient.
   [0990] A compound according to any of Sentences 1 to 29, 32 to 34, 37 to 56, 59 to 61, and 64 to 67, and/or a composition according to any of Sentences 30, 31, 35, 36, 57, 58, 62 and 63, for use in therapy.

[0991] In another aspect the present invention may be applied in the compounds, processes, compositions or uses of the following Clauses numbered 1-56 (wherein reference to any Formula in the Clauses refers only to those Formulas that are defined within Clause 1-56. These formulae are reproduced in FIG. 7).
[0992] 1. A compound comprising the following structure:

[chemical structure]

[0993] wherein:
[0994] r and s are independently an integer selected from 1 to 16; and
[0995] Z is an oligonucleoside moiety.
[0996] 2. A compound according to Clause 1, wherein s is an integer selected from 4 to 12.
[0997] 3. A compound according to Clause 2, wherein s is 6.
[0998] 4. A compound according to any of Clauses 1 to 3, wherein r is an integer selected from 4 to 14.
[0999] 5. A compound according to Clause 4, wherein r is 6.
[1000] 6. A compound according to Clause 4, wherein r is 12.
[1001] 7. A compound according to Clause 5, which is dependent on Clause 3.
[1002] 8. A compound according to Clause 6, which is dependent on Clause 3.
[1003] 9. A compound according to any of Clauses 1 to 8, wherein Z is:

[chemical structure]

[1004] wherein:
[1005] Z₁, Z₂, Z₃, Z₄ are independently at each occurrence oxygen or sulfur; and
[1006] one the bonds between P and Z₂, and P and Z₃ is a single bond and the other bond is a double bond.
[1007] 10. A compound according to any of Clauses 1 to 9, wherein said oligonucleoside is an RNA compound capable of modulating, preferably inhibiting, expression of a target gene.
[1008] 11. A compound according to any of Clause 10, wherein said RNA compound comprises an RNA duplex comprising first and second strands, wherein the first strand is at least partially complementary to an RNA sequence of a target gene, and the second strand is at least partially complementary to said first strand, and wherein each of the first and second strands have 5′ and 3′ ends.
[1009] 12. A compound according to Clause 11, preferably also dependent on Clauses 3 and 6, wherein the RNA compound is attached at the 5′ end of its second strand to the adjacent phosphate.
[1010] 13. A compound according to Clause 11, preferably also dependent on Clauses 3 and 5, wherein the RNA compound is attached at the 3′ end of its second strand to the adjacent phosphate.
[1011] 14. A compound of Formula (II*), preferably dependent on Clause 12:

[chemical structure]

[1012] 15. A compound of Formula (III*), preferably dependent on Clause 13:

[chemical structure]

[1013] 16. A compound as defined in any of Clauses 1 to 15, wherein the oligonucleoside comprises an RNA duplex which further comprises one or more riboses modified at the 2′ position, preferably a plurality of riboses modified at the 2′ position.
[1014] 17. A compound according to Clause 16, wherein the modifications are chosen from 2′-O-methyl, 2′-deoxy-fluoro, and 2′-deoxy.
[1015] 18. A compound according to any of Clauses 1 to 17, wherein the oligonucleoside further comprises one or more degradation protective moieties at one or more ends.
[1016] 19. A compound according to Clause 18, wherein said one or more degradation protective moieties are not present at the end of the oligonucleoside strand that carries the linker/ligand moieties, and/or wherein said one or more degradation protective moieties is selected from phosphorothioate internucleoside linkages, phosphorodithioate internucleoside linkages and inverted abasic nucleosides, wherein said inverted abasic nucleosides are present at the distal end of the same strand to the end that carries the linker/ligand moieties.
[1017] 20. A compound according to any of Clauses 1 to 19, wherein said ligand moiety as depicted in Formula (I*) in Clause 1 comprises one or more ligands.
[1018] 21. A compound according to Clause 20, wherein said ligand moiety as depicted in Formula (I*) in Clause 1 comprises one or more carbohydrate ligands.
[1019] 22. A compound according to Clause 21, wherein said one or more carbohydrates can be a monosaccharide, disaccharide, trisaccharide, tetrasaccharide, oligosaccharide or polysaccharide.
[1020] 23. A compound according to Clause 22, wherein said one or more carbohydrates comprise one or more galactose moieties, one or more lactose moieties, one or more N-AcetylGalactosamine moieties, and/or one or more mannose moieties.
[1021] 24. A compound according to Clause 23, wherein said one or more carbohydrates comprise one or more N-Acetyl-Galactosamine moieties.
[1022] 25. A compound according to Clause 24, which comprises two or three N-AcetylGalactosamine moieties.
[1023] 26. A compound according to any of the preceding Clauses, wherein said one or more ligands are attached in a linear configuration, or in a branched configuration.
[1024] 27. A compound according to Clause 26, wherein said one or more ligands are attached as a biantennary or triantennary branched configuration.
[1025] 28. A compound according to Clauses 20 to 27, wherein said moiety:

[chemical structure]

[1026] as depicted in Formula (I*) in Clause 1 is any of Formulae (IV*), (V*) or (VI*), preferably Formula (IV*):

[chemical structure]

[1027] wherein:
[1028] A₁ is hydrogen, or a suitable hydroxy protecting group;
[1029] a is an integer of 2 or 3; and
[1030] b is an integer of 2 to 5; or

[chemical structure]

[1031] wherein:
[1032] A₁ is hydrogen, or a suitable hydroxy protecting group;
[1033] a is an integer of 2 or 3; and
[1034] c and d are independently integers of 1 to 6; or

[chemical structure]

[1035] wherein:
[1036] A₁ is hydrogen, or a suitable hydroxy protecting group;
[1037] a is an integer of 2 or 3; and
[1038] e is an integer of 2 to 10.
[1039] 29. A compound according to any of Clauses 1 to 28, wherein said moiety:

[chemical structure]

[1040] as depicted in Formula (I*) in Clause 1 is Formula (VII*):

[chemical structure]

[1041] wherein:
[1042] A₁ is hydrogen;
[1043] a is an integer of 2 or 3.
[1044] 30. A compound according to Clause 28 or 29, wherein a=2.
[1045] 31. A compound according to Clause 28 or 29, wherein a=3.
[1046] 32. A compound according to Clause 28, wherein b=3.
[1047] 33. A compound of Formula (VIII*):

[chemical structure]

[1048] 34. A compound of Formula (IX*):

[chemical structure]

[1049] 35. A compound according to Clause 33 or 34, wherein the oligonucleoside comprises an RNA duplex which further comprises one or more riboses modified at the 2′ position, preferably a plurality of riboses modified at the 2′ position.
[1050] 36. A compound according to Clause 35, wherein the modifications are chosen from 2′-O-methyl, 2′-deoxy-fluoro, and 2′-deoxy.
[1051] 37. A compound according to any of Clauses 33 to 36, wherein the oligonucleoside further comprises one or more degradation protective moieties at one or more ends.
[1052] 38. A compound according to Clause 37, wherein said one or more degradation protective moieties are not present at the end of the oligonucleoside strand that carries the linker/ligand moieties, and/or wherein said one or more degradation protective moieties is selected from phosphorothioate internucleoside linkages, phosphorodithioate internucleoside linkages and inverted abasic nucleosides, wherein said inverted abasic nucleosides are present at the distal end of the same strand to the end that carries the linker/ligand moieties.
[1053] 39. A compound according to Clause 33, wherein the oligonucleoside comprises an RNA duplex comprising first and second strands, wherein the first strand is at least partially complementary to an RNA sequence of a target gene, and the second strand is at least partially complementary to said first strand, and wherein each of the first and second strands have 5′ and 3′ ends, and wherein said RNA duplex is attached at the 5′ end of its second strand to the adjacent phosphate.
[1054] 40. A compound according to Clause 34, wherein the oligonucleoside comprises an RNA duplex comprising first and second strands, wherein the first strand is at least partially complementary to an RNA sequence of a target gene, and the second strand is at least partially complementary to said first strand, and wherein each of the first and second strands have 5′ and 3′ ends, and wherein said RNA duplex is attached at the 3′ end of its second strand to the adjacent phosphate.
[1055] 41. A process of preparing a compound according to any of Clauses 1 to 40, which comprises reacting compounds of Formulae (X*) and (XI*):

[chemical structure]

[1056] wherein:
[1057] r and s are independently an integer selected from 1 to 16; and
[1058] Z is an oligonucleoside moiety;
[1059] and where appropriate carrying out deprotection of the ligand and/or annealing of a second strand for the oligonucleoside.
[1060] 42. A process according to Clause 41, to prepare a compound according to any of Clauses 6, 8 to 14, 16 to 33, and 35 to 40, wherein:
[1061] compound of Formula (X*) is Formula (Xa*):

[chemical structure]

[1062] and compound of Formula (XI*) is Formula (XIa*):

[chemical structure]

[1063] wherein the oligonucleoside comprises an RNA duplex comprising first and second strands, wherein the first strand is at least partially complementary to an RNA sequence of a target gene, and the second strand is at least partially complementary to said first strand, and wherein each of the first and second strands have 5′ and 3′ ends, and wherein said RNA duplex is attached at the 5′ end of its second strand to the adjacent phosphate.
[1064] 43. A process according to Clause 41, to prepare a compound according to any of Clauses 5, 7, 9 to 13, 15 to 32, and 34 to 40, wherein:
[1065] compound of Formula (X*) is Formula (Xb*):

[chemical structure]

[1066] and compound of Formula (XI*) is Formula (XIa*):

[chemical structure]

[1067] wherein the oligonucleoside comprises an RNA duplex comprising first and second strands, wherein the first strand is at least partially complementary to an RNA sequence of a target gene, and the second strand is at least partially complementary to said first strand, and wherein each of the first and second strands have 5′ and 3′ ends, and wherein said RNA duplex is attached at the 3′ end of its second strand to the adjacent phosphate.
[1068] 44. A process according to Clauses 42 or 43, wherein:
[1069] compound of Formula (XIa*) is Formula (XIb*):

[chemical structure]

[1070] 45. A compound of Formula (X*):

[chemical structure]

[1071] wherein:
[1072] r is independently an integer selected from 1 to 16; and
[1073] Z is an oligonucleoside moiety.
[1074] 46. A compound of Formula (Xa*):

[chemical structure]

[1075] 47. A compound of Formula (Xb*):

[chemical structure]

[1076] 48. A compound of Formula (XI*):

[chemical structure]

[1077] wherein:
[1078] s is independently an integer selected from 1 to 16; and
[1079] Z is an oligonucleoside moiety.
[1080] 49. A compound of Formula (XIa*):

[chemical structure]

[1081] 50. A compound of Formula (XIb*):

[chemical structure]

[1082] 51. Use of a compound according to any of Clauses 45 and 48 to 50, for the preparation of a compound according to any of Clauses 1 to 40.
[1083] 52. Use of a compound according to Clause 46, for the preparation of a compound according to any of Clauses 6, 8 to 14, 16 to 33, and 35 to 40.
[1084] 53. Use of a compound according to Clause 47, for the preparation of a compound according to any of Clauses 5, 7, 9 to 13, 15 to 32, and 34 to 40.
[1085] 54. A compound or composition obtained, or obtainable by a process according to any of Clauses 41 to 44.
[1086] 55. A pharmaceutical composition comprising of a compound according to any of Clauses 1 to 40, together with a pharmaceutically acceptable carrier, diluent or excipient.
   [1087] A compound according to any of Clauses 1 to 40, for use in therapy.

### EXAMPLES

[1088] The invention will be more fully understood by reference to the following examples. They should not, however, be construed as limiting the scope of the invention. It is understood that the examples and embodiments described herein are for illustrative purposes only and that various modifications or changes in light thereof will be suggested to persons skilled in thet y and are to be included within the spirit and purview of this application and scope of the appended claims.

### Example 1-Target Identification

### BACKGROUND

[1089] All biological functions including haemostasis (the physiological control of bleeding) arise from the co-ordinated interaction of hundreds of interacting molecules—primarily proteins—and can be thought of as the emergent functional consequence of protein-protein interaction networks where each node in the network is a protein and each edge linking the proteins can represent a range of possible interaction types from complex formation to catalytic activation etc.

[1090] Historically such functions have been represented as simplistic linear pathways. As knowledge has grown however, it has become clear that pathways are more complex and that the minimum level of complexity that adequately represents the functional properties of a biological process, and can capture the characteristics of resilience to perturbation and robustness to random damage of individual components, is a network.

[1091] Networks subserving biological function may consist of several interacting canonical pathways as well as additional proteins that are primarily engaged when the canonical function is perturbed. It is therefore critical to develop approaches that can model this complexity in a meaningful and tractable way; and generate target hypotheses that take account of the inherent resistance to change that is a consequence of network robustness. An example of the additional complexity captured by this framework is shown in FIG. 8.

[1092] Oversimplification of biology and the failure to make rational drug target choices based on realistic models of biological processes has contributed to the poor success rate of drug discovery. Furthermore, there has been a lack of rigorous objective methods both for making network models of processes and for prioritising protein targets within these models. As a consequence target selection decisions are frequently made on an ad hoc basis based on preference or evidence unrelated to the functional model.

[1093] Haemostasis is a complex process that involves many cell types and proteins and which is tightly regulated by a system of pro and anti-haemostatic mechanisms. In haemophilia and in other bleeding disorders there are genetic failures of individual protein components that have varying degrees of impact on the ability of the haemostatic system to control bleeding. There is a large unmet need for well tolerated and safe therapies that improve haemostasis and are easy for patients to comply with.

### Process for Identifying Processes and Targets

[1094] The inventors have used a network biology approach to create network models of haemostasis (FIG. 9). The network models are designed to capture all of the important proteins involved in the process as well as their connections and, importantly, the direction of information flow between pairs of proteins.

[1095] The inventors have analysed these network models using proprietary analytical methods. These methods use the directional information to capture key ‘target’ properties such as whether a protein is an integrator of information, a key conduit of information to other parts of the network, an influencer of key proteins and the extent to which an influencer is influenced or influences other proteins (based on absolute and relative number and direction of inputs and outputs). The directional information also enables hierarchical relationships between proteins to be imputed. Proteins higher in the hierarchy and with certain properties may be preferred over others with otherwise similar properties. The relative specificity and magnitude of each property relative to the others made it possible for the inventors to score and rank proteins in terms of their target suitability.

[1096] The ability to characterise the properties of these targets in terms of network relationships enables judgements to be made on the selectivity and magnitude of effect in the chosen context and hence the suitability of each for a given indication.

[1097] This enabled the inventors to identify targets that will provide improved control of bleeding in haemophilia and other bleeding disorders. The analyses used for this purpose are specifically tailored to find novel and non-obvious indirect potentiators of bleeding whose knockdown by GalNAc-siRNA in hepatocytes will be beneficial in haemophilia by suppressing production of a secreted protein that plays a regulatory role in haemostasis.

[1098] In particular, selected groups of haemostasis-related pathway protein sets were used to generate algorithmically a set of directed network models using an internal proprietary database of protein-protein relationships that includes ‘direction’ of interaction. This directional information was derived from a range of public and internal databases supplemented by imputed direction from natural language processing of text from scientific publications. The inventor's network construction algorithms used these sources of information to build ‘directed’ models of the key biological processes.

[1099] Proprietary analytical techniques were then applied to the network models to identify pharmacologically viable targets from within the networks whose knockdown will have a significant influence on the network and by extension on the biological function being modeled.

[1100] The algorithms make extensive use of directional information and hierarchical relationships to identify targets with a range of specific properties that will make them good siRNA targets. Targets were then further filtered by protein class and hepatocyte specific properties according to the therapeutic requirements.

[1101] The above workflow leveraging proprietary data resources and network node metrics has identified two clinically validated modulators of haemostasis that are being developed for treatment of bleeding disorders (AT3 shown above is one of these). In addition, it has highlighted a novel, non-obvious modulator of coagulation, protein Z-dependent protease inhibitor (ZPI) that is predicted by our analytics to be superior to either based on a metric that estimates indirect influence and hence a potentially superior safety profile (FIG. 9).

### Example 2: Synthesis of Tether 1

### General Experimental Conditions

[1102] Thin layer chromatography (TLC) was performed on silica-coated aluminium plates with fluorescence indicator 254 nm from Macherey-Nagel. Compounds were visualized under UV light (254 nm), or after spraying with the 5% H₂SO₄ in methanol (MeOH) or ninhydrin reagent according to Stahl (from Sigma-Aldrich), followed by heating. Flash chromatography was performed with a Biotage Isolera One flash chromatography instrument equipped with a dual variable UV wavelength detector (200-400 nm) using Biotage Sfar Silica 10, 25, 50 or 100 g columns (Uppsala, Sweden).

[1103] All moisture-sensitive reactions were carried out under anhydrous conditions using dry glassware, anhydrous solvents, and argon atmosphere. All commercially available reagents were purchased from Sigma-Aldrich and solvents from Carl Roth GmbH+Co. KG. D-Galactosamine pentaacetate was purchased from AK scientific.

[1104] HPLC/ESI-MS was performed on a Dionex UltiMate 3000 RS UHPLC system and Thermo Scientific MSQ Plus Mass spectrometer using an Acquity UPLC Protein BEH C4 column from Waters (300 Å, 1.7 μm, 2.1×100 mm) at 60° C. The solvent system consisted of solvent A with H₂O containing 0.1% formic acid and solvent B with acetonitrile (ACN) containing 0.1% formic acid. A gradient from 5-100% of B over 15 min with a flow rate of 0.4 mL/min was employed. Detector and conditions: Corona ultra-charged aerosol detection (from esa). Nebulizer Temp.: 25° C. N₂ pressure: 35.1 psi. Filter: Corona. ₁H and ₁₃C NMR spectra were recorded at room temperature on a Varian spectrometer at 500 MHz (₁H NMR) and 125 MHz (₁₃C NMR). Chemical shifts are given in ppm referenced to the solvent residual peak (CDCl₃—₁H NMR: δ at 7.26 ppm and ₁₃C NMR δ at 77.2 ppm; DMSO-d6-₁H NMR: δ at 2.50 ppm and ₁₃C NMR δ at 39.5 ppm). Coupling constants are given in Hertz. Signal splitting patterns are described as singlet (s), doublet (d), triplet (t) or multiplet (m).

### Synthesis Route for the Conjugate Building Block TriGalNAc_Tether1:

[chemical structure]

[1105] Preparation of compound 2: D-Galactosamine pentaacetate (3.00 g, 7.71 mmol, 1.0 eq.) was dissolved in anhydrous dichloromethane (DCM) (30 mL) under argon and trimethylsilyl trifluoromethanesulfonate (TMSOTf, 4.28 g, 19.27 mmol, 2.5 eq.) was added. The reaction was stirred at room temperature for 3 h. The reaction mixture was diluted with DCM (50 mL) and washed with cold saturated aq. NaHCO₃ (100 mL) and water (100 mL). The organic layer was separated, dried over Na₂SO₄ and concentrated to afford the title compound as yellow oil, which was purified by flash chromatography (gradient elution: 0-10% MeOH in DCM in 10 CV). The product was obtained as colourless oil (2.5 g, 98%, rf=0.45 (2% MeOH in DCM)).

[chemical structure]

[1106] Preparation of compound 4: Compound 2 (2.30 g, 6.98 mmol, 1.0 eq.) and azido-PEG3-OH (1.83 g, 10.5 mmol, 1.5 eq.) were dissolved in anhydrous DCM (40 mL) under argon and molecular sieves 3 Å (5 g) were added to the solution. The mixture was stirred at room temperature for 1 h. TMSOTf (0.77 g, 3.49 mmol, 0.5 eq.) was then added to the mixture and the reaction was stirred overnight. The molecular sieves were filtered, the filtrate was diluted with DCM (100 mL) and washed with cold saturated aq. NaHCO₃ (100 mL) and water (100 mL). The organic layer was separated, dried over Na₂SO₄ and the solvent was removed under reduced pressure. The crude material was purified by flash chromatography (gradient elution: 0-3% MeOH in DCM in 10 CV) to afford the title product as light yellow oil (3.10 g, 88%, rf=0.25 (2% MeOH in DCM)). MS: calculated for C₂₀H₃₂N₄O₁₁, 504.21. Found 505.4. 1H NMR (500 MHz, CDCl3) δ 6.21-6.14 (m, 1H), 5.30 (dd, J=3.4, 1.1 Hz, 1H), 5.04 (dd, J=11.2, 3.4 Hz, 1H), 4.76 (d, J=8.6 Hz, 1H), 4.23-4.08 (m, 3H), 3.91-3.80 (m, 3H), 3.74-3.59 (m, 9H), 3.49-3.41 (m, 2H), 2.14 (s, 3H), 2.02 (s, 3H), 1.97 (d, J=4.2 Hz, 6H). 13C NMR (125 MHz, CDCl3) δ 170.6 (C), 170.5 (C), 170.4 (C), 170.3 (C), 102.1 (CH), 71.6 (CH), 70.8 (CH), 70.6 (CH), 70.5 (CH), 70.3 (CH2), 69.7 (CH2), 68.5 (CH2), 66.6 (CH2), 61.5 (CH2), 23.1 (CH3), 20.7 (3×CH3).

[chemical structure]

[1107] Preparation of compound 5: Compound 4 (1.00 g, 1.98 mmol, 1.0 eq.) was dissolved in a mixture of ethyl acetate (EtOAc) and MeOH (30 mL 1:1 v/v) and Pd/C (100 mg) was added. The reaction mixture was degassed using vacuum/argon cycles (3×) and hydrogenated under balloon pressure overnight. The reaction mixture was filtered through celite and washed with EtOAc (30 mL). The solvent was removed under reduced pressure to afford the title compound as colourless oil (0.95 g, quantitative yield, rf=0.25 (10% MeOH in DCM)). The compound was used without further purification. MS: calculated for C₂₀H₃₄N₂O₁₁, 478.2. Found 479.4.

[chemical structure]

[1108] Preparation of compound 7: Tris{[2-(tert-butoxycarbonyl)ethoxy]methyl}-methylamine 6 (3.37 g, 6.67 mmol, 1.0 eq.) was dissolved in a mixture of DCM/water (40 mL 1:1 v/v) and Na₂CO₃ (0.18 g, 1.7 mmol, 0.25 eq.) was added while stirring vigorously. Benzyl chloroformate (2.94 mL, 20.7 mmol, 3.10 eq.) was added dropwise to the previous mixture and the reaction was stirred at room temperature for 24 h. The reaction mixture was diluted with CH₂Cl₂ (100 mL) and washed with water (100 mL). The organic layer was separated and dried over Na2SO4. The solvent was removed under reduced pressure and the resulting crude material was purified by flash chromatography (gradient elution: 0-10% EtOAc in cyclohexane in 12 CV) to afford the title compound as pale yellowish oil (3.9 g, 91%, rf=0.56 (10% EtOAc in cyclohexane)). MS: calculated for C₃₃H₅₃NO₁₁, 639.3. Found 640.9. 1H NMR (500 MHz, DMSO-d6) δ 7.38-7.26 (m, 5H), 4.97 (s, 2H), 3.54 (t, 6H), 3.50 (s, 6H), 2.38 (t, 6H), 1.39 (s, 27H). 13C NMR (125 MHz, DMSO-d6) δ 170.3 (3×C), 154.5 (C), 137.1 (C), 128.2 (2×CH), 127.7 (CH), 127.6 (2×CH), 79.7 (3×C), 68.4 (3×CH2), 66.8 (3×CH2), 64.9 (C), 58.7 (CH2), 35.8 (3×CH2), 27.7 (9×CH3).

[chemical structure]

[1109] Preparation of compound 8: Cbz-NH-tris-Boc-ester 7 (0.20 g, 0.39 mmol, 1.0 eq.) was dissolved in CH₂Cl₂ (1 mL) under argon, trifluoroacetic acid (TFA, 1 mL) was added and the reaction was stirred at room temperature for 1 h. The solvent was removed under reduced pressure, the residue was co-evaporated 3 times with toluene (5 mL) and dried under high vacuum to get the compound as its TFA salt (0.183 g, 98%). The compound was used without further purification. MS: calculated for C₂₁H₂₉NO₁₁, 471.6. Found 472.4.

[chemical structure]

[1110] Preparation of compound 9: CbzNH-tris-COOH 8 (0.72 g, 1.49 mmol, 1.0 eq.) and GalNAc-PEG3-NH₂ 5 (3.56 g, 7.44 mmol, 5.0 eq.) were dissolved in N,N-dimethylformamide (DMF) (25 mL). Then N,N,N′,N′-tetramethyl-O-(1H-benzotriazol-1-yl)uronium hexafluorophosphate (HBTU) (2.78 g, 7.44 mmol, 5.0 eq.), 1-hydroxybenzotriazole hydrate (HOBt) (1.05 g, 7.44 mmol, 5.0 eq.) and N,N-diisopropylethylamine (DIPEA) (2.07 mL, 11.9 mmol, 8.0 eq.) were added to the solution and the reaction was stirred for 72 h. The solvent was removed under reduced pressure, the residue was dissolved in DCM (100 mL) and washed with saturated aq. NaHCO₃ (100 mL). The organic layer was dried over Na₂SO₄, the solvent evaporated and the crude material was purified by flash chromatography (gradient elution: 0-5% MeOH in DCM in 14 CV). The product was obtained as pale yellowish oil (1.2 g, 43%, rf=0.20 (5% MeOH in DCM)). MS: calculated for C₈₁H₁₂₅N₇O₄₁, 1852.9. Found 1854.7. 1H NMR (500 MHz, DMSO-d6) δ 7.90-7.80 (m, 10H), 7.65-7.62 (m, 4H), 7.47-7.43 (m, 3H), 7.38-7.32 (m, 8H), 5.24-5.22 (m, 3H), 5.02-4.97 (m, 4H), 4.60-4.57 (m, 3H), 4.07-3.90 (m 10H), 3.67-3.36 (m, 70H), 3.23-3.07 (m, 25H), 2.18 (s, 10H), 2.00 (s, 13H), 1.89 (s, 11H), 1.80-1.78 (m, 17H). 13C NMR (125 MHz, DMSO-d6) δ 170.1 (C), 169.8 (C), 169.7 (C), 169.4 (C), 169.2 (C), 169.1 (C), 142.7 (C), 126.3 (CH), 123.9 (CH), 118.7 (CH), 109.7 (CH), 100.8 (CH), 70.5 (CH), 69.8 (CH), 69.6 (CH), 69.5 (CH), 69.3 (CH2), 69.0 (CH2), 68.2 (CH2), 67.2 (CH2), 66.7 (CH2), 61.4 (CH2), 22.6 (CH2), 22.4 (3×CH3), 20.7 (9×CH3).

[chemical structure]

[1111] Preparation of compound 10: Triantennary GalNAc compound 9 (0.27 g, 0.14 mmol, 1.0 eq.) was dissolved in MeH (15 mL), 3 drops of acetic acid (AcOH) and Pd/C (30 mg) was added. The reaction mixture was degassed using vacuum/argon cycles (3×) and hydrogenated under balloon pressure overnight. The completion of the reaction was followed by mass spectrometry and the resulting mixture was filtered through a thin pad of celite. The solvent was evaporated and the residue obtained was dried under high vacuum and used for the next step without further purification. The product was obtained as pale yellowish oil (0.24 g, quantitative yield). MS: calculated for C₇₃H₁₁₉N₇O₃₉, 1718.8. Found 1719.3.

[chemical structure]

[1112] Preparation of compound 11: Commercially available suberic acid bis(N-hydroxysuccinimide ester) (3.67 g, 9.9 mmol, 1.0 eq.) was dissolved in DMF (5 mL) and triethylamine (1.2 mL) was added. To this solution was added dropwise a solution of 3-azido-1-propylamine (1.0 g, 9.9 mmol, 1.0 eq.) in DMF (5 mL). The reaction was stirred at room temperature for 3 h. The reaction mixture was diluted with EtOAc (100 mL) and washed with water (50 mL). The organic layer was separated, dried over Na₂SO₄ and the solvent was removed under reduced pressure. The crude material was purified by flash chromatography (gradient elution: 0-5% MeOH in DCM in 16 CV). The product was obtained as white solid (1.54 g, 43%, rf=0.71 (5% MeOH in DCM)). MS: calculated for C₁₅H₂₃N₅O₅, 353.4. Found 354.3.

[chemical structure]

[1113] Preparation of TriGalNAc (12): Triantennary GalNAc compound 10 (0.35 g, 0.24 mmol, 1.0 eq.) and compound 11 (0.11 g, 0.31 mmol, 1.5 eq.) were dissolved in DCM (5 mL) under argon and triethylamine (0.1 mL, 0.61 mmol, 3.0 eq.) was added. The reaction was stirred at room temperature overnight. The solvent was removed under reduced pressure, the residue was dissolved in EtOAc (100 mL) and washed with water (100 mL). The organic layer was separated and dried over Na₂SO₄. The solvent was evaporated and the resulting crude material was purified by flash chromatography (elution gradient: 0-10% MeOH in DCM in 20 CV) to afford the title compound as white fluffy solid (0.27 g, 67%, rf=0.5 (10% MeOH in DCM)). MS: calculated for C₈₄H₁₃₇N₁₁O₄₁, 1957.1. Found 1959.6.

Conjugation of Tether 1 to a siRNA Strand: Monofluoro Cyclooctyne (MFCO) Conjugation at 5′- or 3′-End

### 5′-End MFCO Conjugation

[chemical structure]

3′-end MFCO conjugation

[chemical structure]

[1114] General conditions for MFCO conjugation: Amine-modified single strand was dissolved at 700 OD/mL in 50 mM carbonate/bicarbonate buffer pH 9.6/dimethyl sulfoxide (DMSO) 4:6 (v/v) and to this solution was added one molar equivalent of a 35 mM solution of MFCO-C6-NHS ester (Berry&Associates, Cat. #LK 4300) in DMF. The reaction was carried out at room temperature and after 1 h another molar equivalent of the MFCO solution was added. The reaction was allowed to proceed for an additional hour and was monitored by LC/MS. At least two molar equivalent excess of the MFCO NHS ester reagent relative to the amino modified oligonucleotide were needed to achieve quantitative consumption of the starting material. The reaction mixture was diluted 15-fold with water, filtered through a 1.2 μm filter from Sartorius and then purified by reserve phase (RP HPLC) on an Akta Pure instrument (GE Healthcare).

[1115] Purification was performed using a XBridge C18 Prep 19×50 mm column from Waters. Buffer A was 100 mM TEAAc pH 7 and buffer B contained 95% acetonitrile in buffer A. A flow rate of 10 mL/min and a temperature of 60° C. were employed. UV traces at 280 nm were recorded. A gradient of 0-100% B within 60 column volumes was employed.

[1116] Fractions containing full length conjugated oligonucleotide were pooled, precipitated in the freezer with 3 M NaOAc, pH 5.2 and 85% ethanol and the collected pellet was dissolved in water. Samples were desalted by size exclusion chromatography and concentrated using a speed-vac concentrator to yield the conjugated oligonucleotide in an isolated yield of 40-80%.

### 5′-GalNAc-T1 Conjugates

[chemical structure]

### 3′-GalNAc-T1 Conjugates

[chemical structure]

[1117] General procedure for TriGalNAc conjugation: MFCO-modified single strand was dissolved at 2000 OD/mL in water and to this solution was added one equivalent solution of compound 12 (10 mM) in DMF. The reaction was carried out at room temperature and after 3 h 0.7 molar equivalent of the compound 12 solution was added. The reaction was allowed to proceed overnight and completion was monitored by LCMS. The conjugate was diluted 15-fold in water, filtered through a 1.2 μm filter from Sartorius and then purified by RP OaPLC on an Akta Pure instrument (GE Healthcare).

[1118] RP HIPLC purification was performed using a XBridge C18 Prep 19×50 mm column from Waters. Buffer A was 100 mM triethyl ammonium acetate pH 7 and buffer B contained 9500 acetonitrile in buffer A. A flow rate of 10 mL/min and a temperature of 60° C. were employed. UV traces at 280 nm were recorded. A gradient of0-100 B within 60 column volumes was employed.

[1119] Fractions containing full-length conjugated oligonucleotide were pooled, precipitated in the freezer with 3 M NaOAc, pH 5.2 and 8500 ethanol and the collected pellet was dissolved in water to give an oligonucleotide solution of about 1000 OD/mL. The 0-acetates were removed by adding 20% aqueous ammonia. Quantitative removal of these protecting groups was verified by LC-MS.

[1120] The conjugates were desalted by size exclusion chromatography using Sephadex G25 Fine resin (GE Healthcare) on an Akta Pure (GE Healthcare) instrument to yield the conjugated oligonucleotides in an isolated yield of 50-70%.

[1121] The following schemes further set out the routes of synthesis:

[chemical structure]

[chemical structure]

[chemical structure]

[chemical structure]

[chemical structure]

### Example 3: Duplex Annealing

[1122] To generate the desired siRNA duplex, the two complementary strands were annealed by combining equimolar aqueous solutions of both strands. The mixtures were placed into a water bath at 70° C. for 5 minutes and subsequently allowed to cool to ambient temperature within 2 h. The duplexes were lyophilized for 2 days and stored at −20° C.

[1123] The duplexes were analyzed by analytical SEC HPLC on Superdex™ 75 Increase 5/150 GL column 5×153-158 mm (Cytiva) on a Dionex Ultimate 3000 (Thermo Fisher Scientific) HPLC system. Mobile phase consisted of 1×PBS containing 10% acetonitrile. An isocratic gradient was run in 10 min at a flow rate of 1.5 mL/min at room temperature. UV traces at 260 and 280 nm were recorded. Water (LC-MS grade) was purchased from Sigma-Aldrich and Phosphate-buffered saline (PBS; 10×, pH 7.4) was purchased from GIBCO (Thermo Fisher Scientific).

### Example 4: Synthesis of Tether 2

### General Experimental Conditions

[1124] Thin layer chromatography (TLC) was performed on silica-coated aluminium plates with fluorescence indicator 254 nm from Macherey-Nagel. Compounds were visualized under UV light (254 nm), or after spraying with the 5% H₂SO₄ in methanol (MeOH) or ninhydrin reagent according to Stahl (from Sigma-Aldrich), followed by heating. Flash chromatography was performed with a Biotage Isolera One flash chromatography instrument equipped with a dual variable UV wavelength detector (200-400 nm) using Biotage Sfar Silica 10, 25, 50 or 100 g columns (Uppsala, Sweden).

[1125] All moisture-sensitive reactions were carried out under anhydrous conditions using dry glassware, anhydrous solvents, and argon atmosphere. All commercially available reagents were purchased from Sigma-Aldrich and solvents from Carl Roth GmbH+Co. KG. D-Galactosamine pentaacetate was purchased from AK scientific.

[1126] HPLC/ESI-MS was performed on a Dionex UltiMate 3000 RS UHPLC system and Thermo Scientific MSQ Plus Mass spectrometer using an Acquity UPLC Protein BEH C4 column from Waters (300 Å, 1.7 μm, 2.1×100 mm) at 60° C. The solvent system consisted of solvent A with H2O containing 0.1% formic acid and solvent B with acetonitrile (ACN) containing 0.1% formic acid. A gradient from 5-100% of B over 15 min with a flow rate of 0.4 mL/min was employed. Detector and conditions: Corona ultra-charged aerosol detection (from esa). Nebulizer Temp.: 25° C. N₂ pressure: 35.1 psi. Filter: Corona.

[1127] ₁H and ₁₃C NMR spectra were recorded at room temperature on a Varian spectrometer at 500 MHz (₁H NMR) and 125 MHz (₁₃C NMR). Chemical shifts are given in ppm referenced to the solvent residual peak (CDCl₃—₁H NMR: δ at 7.26 ppm and ₁₃C NMR δ at 77.2 ppm; DMSO-d6-₁H NMR: δ at 2.50 ppm and ₁₃C NMR δ at 39.5 ppm). Coupling constants are given in Hertz. Signal splitting patterns are described as singlet (s), doublet (d), triplet (t) or multiplet (m).

### Synthesis Route for the Conjugate Building Block TriGalNAc_Tether2:

[chemical structure]

[1128] Preparation of compound 2: D-Galactosamine pentaacetate (3.00 g, 7.71 mmol, 1.0 eq.) was dissolved in anhydrous dichloromethane (DCM) (30 mL) under argon and trimethylsilyl trifluoromethanesulfonate (TMSOTf, 4.28 g, 19.27 mmol, 2.5 eq.) was added. The reaction was stirred at room temperature for 3 h. The reaction mixture was diluted with DCM (50 mL) and washed with cold saturated aq. NaHCO₃ (100 mL) and water (100 mL). The organic layer was separated, dried over Na₂SO₄, and concentrated to afford the title compound as yellow oil, which was purified by flash chromatography (gradient elution: 0-10% MeOH in DCM in 10 CV). The product was obtained as colourless oil (2.5 g, 98%, rf=0.45 (2% MeOH in DCM)).

[chemical structure]

[1129] Preparation of compound 4: Compound 2 (2.30 g, 6.98 mmol, 1.0 eq.) and azido-PEG3-OH (1.83 g, 10.5 mmol, 1.5 eq.) were dissolved in anhydrous DCM (40 mL) under argon and molecular sieves 3 Å (5 g) were added to the solution. The mixture was stirred at room temperature for 1 h. TMSOTf (0.77 g, 3.49 mmol, 0.5 eq.) was then added to the mixture and the reaction was stirred overnight. The molecular sieves were filtered, the filtrate was diluted with DCM (100 mL) and washed with cold saturated aq. NaHCO₃ (100 mL) and water (100 mL). The organic layer was separated, dried over Na2SO4 and the solvent was removed under reduced pressure. The crude material was purified by flash chromatography (gradient elution: 0-3% MeOH in DCM in 10 CV) to afford the title product as light-yellow oil (3.10 g, 88%, rf=0.25 (2% MeOH in DCM)). MS: calculated for C₂₀H₃₂N₄O₁₁, 504.21. Found 505.4. 1H NMR (500 MHz, CDCl3) δ 6.21-6.14 (m, 1H), 5.30 (dd, J=3.4, 1.1 Hz, 1H), 5.04 (dd, J=11.2, 3.4 Hz, 1H), 4.76 (d, J=8.6 Hz, 1H), 4.23-4.08 (m, 3H), 3.91-3.80 (m, 3H), 3.74-3.59 (m, 9H), 3.49-3.41 (m, 2H), 2.14 (s, 3H), 2.02 (s, 3H), 1.97 (d, J=4.2 Hz, 6H). 13C NMR (125 MHz, CDCl3) δ 170.6 (C), 170.5 (C), 170.4 (C), 170.3 (C), 102.1 (CH), 71.6 (CH), 70.8 (CH), 70.6 (CH), 70.5 (CH), 70.3 (CH2), 69.7 (CH2), 68.5 (CH2), 66.6 (CH2), 61.5 (CH2), 23.1 (CH3), 20.7 (3×CH3).

[chemical structure]

[1130] Preparation of compound 5: Compound 4 (1.00 g, 1.98 mmol, 1.0 eq.) was dissolved in a mixture of ethyl acetate (EtOAc) and MeOH (30 mL 1:1 v/v) and Pd/C (100 mg) was added. The reaction mixture was degassed using vacuum/argon cycles (3×) and hydrogenated under balloon pressure overnight. The reaction mixture was filtered through celite and washed with EtOAc (30 mL). The solvent was removed under reduced pressure to afford the title compound as colourless oil (0.95 g, quantitative yield, rf=0.25 (10% MeOH in DCM)). The compound was used without further purification. MS: calculated for C₂₀H₃₄N₂O₁₁, 478.2. Found 479.4.

[chemical structure]

[1131] Preparation of compound 7: Tris{[2-(tert-butoxycarbonyl)ethoxy]methyl}-methylamine 6 (3.37 g, 6.67 mmol, 1.0 eq.) was dissolved in a mixture of DCM/water (40 mL 1:1 v/v) and Na₂CO₃ (0.18 g, 1.7 mmol, 0.25 eq.) was added while stirring vigorously. Benzyl chloroformate (2.94 mL, 20.7 mmol, 3.10 eq.) was added dropwise to the previous mixture and the reaction was stirred at room temperature for 24 h. The reaction mixture was diluted with CH₂Cl₂ (100 mL) and washed with water (100 mL). The organic layer was separated and dried over Na₂SO₄. The solvent was removed under reduced pressure and the resulting crude material was purified by flash chromatography (gradient elution: 0-10% EtOAc in cyclohexane in 12 CV) to afford the title compound as pale yellowish oil (3.9 g, 91%, rf=0.56 (10% EtOAc in cyclohexane)). MS: calculated for C₃₃H₅₃NO₁₁, 639.3. Found 640.9. 1H NMR (500 MHz, DMSO-d6) δ 7.38-7.26 (m, 5H), 4.97 (s, 2H), 3.54 (t, 6H), 3.50 (s, 6H), 2.38 (t, 6H), 1.39 (s, 27H). 13C NMR (125 MHz, DMSO-d6) δ 170.3 (3×C), 154.5 (C), 137.1 (C), 128.2 (2×CH), 127.7 (CH), 127.6 (2×CH), 79.7 (3×C), 68.4 (3×CH2), 66.8 (3×CH2), 64.9 (C), 58.7 (CH2), 35.8 (3×CH2), 27.7 (9×CH3).

[chemical structure]

[1132] Preparation of compound 8: Cbz-NH-tris-Boc-ester 7 (0.20 g, 0.39 mmol, 1.0 eq.) was dissolved in CH₂Cl₂ (1 mL) under argon, trifluoroacetic acid (TFA, 1 mL) was added and the reaction was stirred at room temperature for 1 h. The solvent was removed under reduced pressure, the residue was co-evaporated 3 times with toluene (5 mL) and dried under high vacuum to get the compound as its TFA salt (0.183 g, 98%). The compound was used without further purification. MS: calculated for C₂₁H₂₉NO₁₁, 471.6. Found 472.4.

[chemical structure]

[1133] Preparation of compound 9: CbzNH-tris-COOH 8 (0.72 g, 1.49 mmol, 1.0 eq.) and GalNAc-PEG3-NH2 5 (3.56 g, 7.44 mmol, 5.0 eq.) were dissolved in N,N-dimethylformamide (DMF) (25 mL). Then N,N,N′,N′-tetramethyl-O-(1H-benzotriazol-1-yl)uronium hexafluorophosphate (HBTU) (2.78 g, 7.44 mmol, 5.0 eq.), 1-hydroxybenzotriazole hydrate (HOBt) (1.05 g, 7.44 mmol, 5.0 eq.) and N,N-diisopropylethylamine (DIPEA) (2.07 mL, 11.9 mmol, 8.0 eq.) were added to the solution and the reaction was stirred for 72 h. The solvent was removed under reduced pressure, the residue was dissolved in DCM (100 mL) and washed with saturated aq. NaHCO₃ (100 mL). The organic layer was dried over Na₂SO₄, the solvent evaporated and the crude material was purified by flash chromatography (gradient elution: 0-5% MeOH in DCM in 14 CV). The product was obtained as pale yellowish oil (1.2 g, 43%, rf=0.20 (5% MeOH in DCM)). MS: calculated for C₈₁H₁₂₅N₇O₄₁, 1852.9. Found 1854.7. 1H NMR (500 MHz, DMSO-d6) δ 7.90-7.80 (m, 10H), 7.65-7.62 (m, 4H), 7.47-7.43 (m, 3H), 7.38-7.32 (m, 8H), 5.24-5.22 (m, 3H), 5.02-4.97 (m, 4H), 4.60-4.57 (m, 3H), 4.07-3.90 (m 10H), 3.67-3.36 (m, 70H), 3.23-3.07 (m, 25H), 2.18 (s, 10H), 2.00 (s, 13H), 1.89 (s, 11H), 1.80-1.78 (m, 17H). 13C NMR (125 MHz, DMSO-d6) δ 170.1 (C), 169.8 (C), 169.7 (C), 169.4 (C), 169.2 (C), 169.1 (C), 142.7 (C), 126.3 (CH), 123.9 (CH), 118.7 (CH), 109.7 (CH), 100.8 (CH), 70.5 (CH), 69.8 (CH), 69.6 (CH), 69.5 (CH), 69.3 (CH2), 69.0 (CH2), 68.2 (CH2), 67.2 (CH2), 66.7 (CH2), 61.4 (CH2), 22.6 (CH2), 22.4 (3×CH3), 20.7 (9×CH3).

[chemical structure]

[1134] Preparation of compound 10: Triantennary GaNAc compound 9 (0.27 g, 0.14 mmol, 1.0 eq.) was dissolved in MeOH (15 mL), 3 drops of acetic acid (AcOH) and Pd/C (30 mg) was added. The reaction mixture was degassed using vacuum/argon cycles (3×) and hydrogenated under balloon pressure overnight. The completion of the reaction was followed by mass spectrometry and the resulting mixture was filtered through a thin pad of celite. The solvent was evaporated, and the residue obtained was dried under high vacuum and used for the next step without further purification. The product was obtained as pale yellowish oil (0.24 g, quantitative yield). MS: calculated for C₇₃H₁₁₉N₇O₃₉, 1718.8. Found 1719.3.

[chemical structure]

[1135] Preparation of compound 14: Triantennary GalNAc compound 10 (0.45 g, 0.26 mmol, 1.0 eq.), HBTU (0.19 g, 0.53 mmol, 2.0 eq.) and DIPEA (0.23 mL, 1.3 mmol, 5.0 eq.) were dissolved in DCM (10 mL) under argon. To this mixture, it was added dropwise a solution of compound 13 (0.14 g, 0.53 mmol, 2.0 eq.) in DCM (5 mL). The reaction was stirred at room temperature overnight. The solvent was removed, and the residue was dissolved in EtOAc (50 mL), washed with water (50 mL) and dried over Na₂SO₄. The solvent was evaporated, and the crude material was purified by flash chromatography (gradient elution: 0-5% MeOH in DCM in 20 CV). The product was obtained as white fluffy solid (0.25 g, 48%, rf=0.4 (10% MeOH in DCM)). MS: calculated for C₈₈H₁₃₇N₇O₄₂, 1965.1. Found 1965.6.

[chemical structure]

[1136] Preparation of TriGalNAc (15): Triantennary GalNAc compound 14 (0.31 g, 0.15 mmol, 1.0 eq.) was dissolved in EtOAc (15 mL) and Pd/C (40 mg) was added. The reaction mixture was degassed by using vacuum/argon cycles (3×) and hydrogenated under balloon pressure overnight. The completion of the reaction was monitored by mass spectrometry and the resulting mixture was filtered through a thin pad of celite. The solvent was removed under reduced pressure and the resulting residue was dried under high vacuum overnight. The residue was used for conjugations to oligonucleosides without further purification (0.28 g, quantitative yield). MS: calculated for C₈₁H₁₃₁N₇O₄₂, 1874.9. Found 1875.3.

[1137] Conjugation of Tether 2 to a siRNA strand: TriGalNAc tether 2 (GalNAc-T2) conjugation at 5′-end or 3′-end

### 5′-GalNAc-T2 Conjugates

[chemical structure]

### 3′-Ga2NAc-T2 Conjugates

[chemical structure]

[1138] Preparation of TriGalNAc tether 2 NHS ester: To a solution of carboxylic acid tether 2 (compound 15, 227 mg, 121 μmol) in DMF (2.1 mL), N-hydroxysuccinimide (NHS) (15.3 mg, 133 μmol) and N,N′-diisopropylcarbodiimide (DIC) (19.7 μL, 127 μmol) were added. The solution was stirred at room temperature for 18 h and used without purification for the subsequent conjugation reactions.

[1139] General procedure for triGalNAc tether 2 conjugation: Amine-modified single strand was dissolved at 700 OD/mL in 50 mM carbonate/bicarbonate buffer pH 9.6/DMSO 4:6 (v/v) and to this solution was added one molar equivalent of Tether 2 NHS ester (57 mM) solution in DMF. The reaction was carried out at room temperature and after 1 h another molar equivalent of the NHS ester solution was added. The reaction was allowed to proceed for one more hour and reaction progress was monitored by LCMS. At least two molar equivalent excess of the NHS ester reagent relative to the amino modified oligonucleoside were needed to achieve quantitative consumption of the starting material. The reaction mixture was diluted 15-fold with water, filtered once through 1.2 μm filter from Sartorius and then purified by reserve phase (RP HPLC) on an Äkta Pure (GE Healthcare) instrument.

[1140] The purification was performed using a XBridge C18 Prep 19×50 mm column from Waters. Buffer A was 100 mM TEAA pH 7 and buffer B contained 95% acetonitrile in buffer A. A flow rate of 10 mL/min and a temperature of 60° C. were employed. UV traces at 280 nm were recorded. A gradient of 0-100% B within 60 column volumes was employed.

[1141] Fractions containing full-length conjugated oligonucleosides were pooled together, precipitated in the freezer with 3 M NaOAc, pH 5.2 and 85% ethanol and then dissolved at 1000 OD/mL in water. The O-acetates were removed with 20% ammonium hydroxide in water until completion (monitored by LC-MS).

[1142] The conjugates were desalted by size exclusion chromatography using Sephadex G25 Fine resin (GE Healthcare) on an Akta Pure (GE Healthcare) instrument to yield the conjugated oligonucleotides in an isolated yield of 60-80%.

[1143] The conjugates were characterized by HPLC-MS analysis with a 2.1×50 mm XBridge C18 column (Waters) on a Dionex Ultimate 3000 (Thermo Fisher Scientific) HPLC system equipped with a Compact ESI-Qq-TOF mass spectrometer (Bruker Daltonics). Buffer A was 16.3 mM triethylamine, 100 mM HFIP in 1% MeOH in H20 and buffer B contained 95% MeOH in buffer A. A flow rate of 250 μL/min and a temperature of 60° C. were employed. UV traces at 260 and 280 nm were recorded. A gradient of 1-100% B within 31 min was employed.

[1144] The following schemes further set out the routes of synthesis:

[chemical structure]

[chemical structure]

[chemical structure]

[chemical structure]

[chemical structure]

[chemical structure]

### Example 5: Duplex Annealing

[1145] To generate the desired siRNA duplex, the two complementary strands were annealed by combining equimolar aqueous solutions of both strands. The mixtures were placed into a water bath at 70° C. for 5 minutes and subsequently allowed to cool to ambient temperature within 2 h. The duplexes were lyophilized for 2 days and stored at −20° C.

[1146] The duplexes were analyzed by analytical SEC HPLC on Superdex™ 75 Increase 5/150 GL column 5×153-158 mm (Cytiva) on a Dionex Ultimate 3000 (Thermo Fisher Scientific) HPLC system. Mobile phase consisted of 1×PBS containing 10% acetonitrile. An isocratic gradient was run in 10 min at a flow rate of 1.5 mL/min at room temperature. UV traces at 260 and 280 nm were recorded. Water (LC-MS grade) was purchased from Sigma-Aldrich and Phosphate-buffered saline (PBS; lOx, pH 7.4) was purchased from GIBCO (Thermo Fisher Scientific).

### Example 6: Alternative Synthesis Route for the Conjugate Building Block Trigalnac_Tether2

[chemical structure]

[chemical structure]

[chemical structure]

[chemical structure]

[chemical structure]

Conjugation of Tether 2 to a siRNA Strand: TriGalNAc Tether 2 (GalNAc-T2) Conjugation at 5′-End or 3′-End

### Conjugation Conditions

[chemical structure]

[1147] Pre-activation: To a solution of compound 15 (16 umol, 4 eq.) in DMF (160 μL) was added TFA-O—PFP (15 μl, 21 eq.) followed by DIPEA (23 μl, 32 eq.) at 25° C. The tube was shaken for 2 h at 25° C. The reaction was quenched with H2O (10 μL).

[1148] Coupling: The resulting mixture was diluted with DMF (400 μl), followed by addition of oligo-amine solution (4.0 μmol in 10×PBS, pH 7.4, 500 μL; final oligo concentration in organic and aqueous solution: 4 μmol/ml=4 mM). The tube was shaken at 25° C. for 16 h and the reaction was analysed by LCMS. The resulting mixture was treated with 28% NH4OH (4.5 ml) and shaken for 2 h at 25° C. The mixture was analysed by LCMS, concentrated, and purified by IP—RP HPLC to produce the oligonucleotides conjugated to tether 2 GalNAc.

### 5′-GalNAc-T2 Conjugates

[chemical structure]

### 3′-GalNAc-T2 Conjugates

[chemical structure]

### Example 7: Solid Phase Synthesis Method: Scale ≤1 μMol

[1149] Syntheses of siRNA sense and antisense strands were performed on a MerMadel92X synthesiser with commercially available solid supports made of controlled pore glass with universal linker (Universal CPG, with a loading of 40 μmol/g; LGC Biosearch or Glen Research).

[1150] RNA phosphoramidites were purchased from ChemGenes or Hongene.

[1151] The 2′-O-Methyl phosphoramidites used were the following: 5′-(4,4′-dimethoxytrityl)-N-benzoyl-adenosine 2′-O-methyl-3′-[(2-cyanoethyl)-(N,N-diisopropyl)]-phosphoramidite, 5′-(4,4′-dimethoxytrityl)-N-acetyl-cytidine 2′-O-methyl-3′-[(2-cyanoethyl)-(N,N-diisopropyl)]-phosphoramidite, 5′-(4,4′-dimethoxytrityl)-N-isobutyryl-guanosine 2′-O-methyl-3′-[(2-cyanoethyl)-(N,N-diisopropyl)]-phosphoramidite, 5′-(4,4′-dimethoxytrityl)-uridine 2′-O-methyl-3′-[(2-cyanoethyl)-(N,N-diisopropyl)]-phosphoramidite.

[1152] The 2′-F phosphoramidites used were the following: 5′-dimethoxytrityl-N-benzoyl-deoxyadenosine 2′-fluoro-3′-[(2-cyanoethyl)-(N,N-diisopropyl)]-phosphoramidite, 5′-dimethoxytrityl-N-acetyl-deoxycytidine 2′-fluoro-3′-[(2-cyanoethyl)-(N,N-diisopropyl)]-phosphoramidite, 5′-dimethoxytrityl-N-isobutyryl-deoxyguanosine 2′-fluoro-3′-[(2-cyanoethyl)-(N,N-diisopropyl)]-phosphoramidite and 5′-dimethoxytrityl-deoxyuridine 2′-fluoro-3′-[(2-cyanoethyl)-(N,N-diisopropyl)]-phosphoramidite.

[1153] All phosphoramidites were dissolved in anhydrous acetonitrile (Honeywell Research Chemicals) at a concentration of 0.05M, except 2′-O-methyl-uridine phosphoramidite which was dissolved in DMF/MeCN (1:4, v/v). Iodine at 0.02M in acetonitrile/Pyridine/H₂O (DNAchem) was used as oxidizing reagent. Thiolation for phosphorothioate linkages was performed with 0.2 M PADS (TCI) in acetonitrile/pyridine 1:1 v/v. 5-Ethyl thiotetrazole (ETT), 0.25M mM in acetonitrile was used as activator solution.

[1154] Inverted abasic phosphoramidite, 3-O-Dimethoxytrityl-2-deoxyribose-5-[(2-cyanoethyl)-(N, N-diisopropyl)]-phosphoramidite were purchased from Chemgenes (ANP-1422) or Hongene (OP-040).

[1155] At each cycle, the DMT was removed by deblock solution, 3% TCA in DCM (DNAchem).

[1156] The coupling time was 180 seconds. The oxidizer contact time was set to 80 seconds and thiolation time was 2*100 seconds.

[1157] At the end of the synthesis, the oligonucleotides were cleaved from the solid support using a NH₄₀H:EtOH solution 4:1 (v/v) for 20 hours at 45° C. (TCI). The solid support was then filtered off, the filter was thoroughly washed with H₂O and the volume of the combined solution was reduced by evaporation under reduced pressure.

[1158] Oligonucleotide were treated to form the sodium salt by ultracentrifugation using Amicon Ultra-2 Centrifugal Filter Unit; PBS buffer (10×, Teknova, pH 7.4, Sterile) or by EtOH precipitation from 1M sodium acetate.

[1159] The single strands identity were assessed by MS ESI- and then, were annealed in water to form the final duplex siRNA and duplex purity were assessed by size exclusion chromatography.

### Example 8: Solid Phase Synthesis Method: Scale ≥5 μMol

[1160] Syntheses of siRNA sense and antisense strands were performed on a MerMadel2 synthesiser with commercially available solid supports made of controlled pore glass with universal linker (Universal CPG, with a loading of 40 μmol/g; LGC Biosearch or Glen Research) at 5 μmol scale. Sense strand destined to 3′ conjugation were sytnthesised at 12 μmol on 3′-PT-Amino-Modifier C6 CPG 500 Å solid support with a loading of 86 μmol/g (LGC).

[1161] RNA phosphoramidites were purchased from ChemGenes or Hongene.

[1162] The 2′-O-Methyl phosphoramidites used were the following: 5′-(4,4′-dimethoxytrityl)-N-benzoyl-adenosine 2′-O-methyl-3′-[(2-cyanoethyl)-(N,N-diisopropyl)]-phosphoramidite, 5′-(4,4′-dimethoxytrityl)-N-acetyl-cytidine 2′-O-methyl-3′-[(2-cyanoethyl)-(N,N-diisopropyl)]-phosphoramidite, 5′-(4,4′-dimethoxytrityl)-N-isobutyryl-guanosine 2′-O-methyl-3′-[(2-cyanoethyl)-(N,N-diisopropyl)]-phosphoramidite, 5′-(4,4′-dimethoxytrityl)-uridine 2′-O-methyl-3′-[(2-cyanoethyl)-(N,N-diisopropyl)]-phosphoramidite.

[1163] The 2′-F phosphoramidites used were the following: 5′-dimethoxytrityl-N-benzoyl-deoxyadenosine 2′-fluoro-3′-[(2-cyanoethyl)-(N,N-diisopropyl)]-phosphoramidite, 5′-dimethoxytrityl-N-acetyl-deoxycytidine 2′-fluoro-3′-[(2-cyanoethyl)-(N,N-diisopropyl)]-phosphoramidite, 5′-dimethoxytrityl-N-isobutyryl-deoxyguanosine 2′-fluoro-3′-[(2-cyanoethyl)-(N,N-diisopropyl)]-phosphoramidite and 5′-dimethoxytrityl-deoxyuridine 2′-fluoro-3′-[(2-cyanoethyl)-(N,N-diisopropyl)]-phosphoramidite.

[1164] Inverted abasic phosphoramidite, 3-O-Dimethoxytrityl-2-deoxyribose-5-[(2-cyanoethyl)-(N, N-diisopropyl)]-phosphoramidite were purchased from Chemgenes (ANP-1422) or Hongene (OP-040).

[1165] All phosphoramidites were dissolved in anhydrous acetonitrile (Honeywell Research Chemicals) at a concentration of 0.05M, except 2′-O-methyl-uridine phosphoramidite which was dissolved in DMF/MeCN (1:4, v/v). Iodine at 0.02M in acetonitrile/Pyridine/H₂O (DNAchem) was used as oxidizing reagent. Thiolation for phosphorothioate linkages was performed with 0.2 M PADS (TCI) in acetonitrile/pyridine 1:1 v/v. 5-Ethyl thiotetrazole (ETT), 0.25M mM in acetonitrile was used as activator solution.

[1166] At each cycle, the DMT was removed by deblock solution, 3% TCA in DCM (DNAchem).

[1167] For strands synthesised on universal CPG the coupling was performed with 8 eq. of amidite for 130 seconds. The oxidation time was 47 seconds, the thiolation time was 210 seconds.

[1168] For strands synthesised on 3′-PT-Amino-Modifier C6 CPG the coupling was performed with 8 eq. of amidite for 2*150 seconds. The oxidation time was 47 seconds, the thiolation time was 250 seconds

[1169] At the end of the synthesis, the oligonucleotides were cleaved from the solid support using a NH4OH:EtOH solution 4:1 (v/v) for 20 hours at 45° C. (TCI). The solid support was then filtered off, the filter was thoroughly washed with H₂O and the volume of the combined solution was reduced by evaporation under reduced pressure.

[1170] Oligonucleotide were treated to form the sodium salt by EtOH precipitation from 1M sodium acetate.

[1171] The single strand oligonucleotides were purified by IP—RP HPLC on Xbridge BEH C18 5 μm, 130 Å, 19×150 mm (Waters) column with an increasing gradient of B in A. Mobile phase A: 240 mM HFIP, 7 mM TEA and 5% methanol in water; mobile phase B: 240 mM HFIP, 7 mM TEA in methanol.

[1172] The single strands purity and identity were assessed by UPLC/MS ESI-on Xbridge BEH C18 2.5 μm, 3×50 mm (Waters) column with an increasing gradient of B in A. Mobile phase A: 100 mM HFIP, 5 mM TEA in water; mobile phase B: 20% mobile phase A: 80% Acetonitrile (v/v).

[1173] Sense strands were conjugated as per protocol provided in any of Examples 2, 4, 6.

[1174] Sense and Antisense strands were then annealed in water to form the final duplex siRNA and duplex purity were assessed by size exclusion chromatography.

[1175] The present invention is not intended to be limited in scope to the particular disclosed embodiments, which are provided, for example, to illustrate various aspects of the invention. Various modifications to the compositions and methods described will become apparent from the description and teachings herein. Such variations may be practiced without departing from the true scope and spirit of the disclosure and are intended to fall within the scope of the present disclosure.

### Example 9: In Vivo Efficacy Data in a Haemophilia Mouse Model

[1176] A total of 20 Haem A mice (Bi, L., Lawler, A., Antonarakis, S. et al. Targeted disruption of the mouse factor VIII gene produces a model of haemophilia A. Nat Genet 10, 119-121 (1995). https://doi.org/10.1038/ng0595-119) and 10 WT mice were used in this study:

| | | | Dosing time | Termination | |
|---|---|---|---|---|---|
| | | | (pre-injury; | time (post | |
| Group | Mouse strain | Treatment | days) | injury; days) | N |
| 1 | WT | Vehicle | −8 | 10 | 10 |
| 2 | Haem A | Vehicle | −8 | 10 | 10 |
| 3 | Haem A | ETXM1184 - | −8 | 10 | 10 |
| | | 10 mg/kg s.c. | | | |

[1177] 8 days prior to induction of knee bleed, mice were injected subcutaneously (s.c.) with the GalNAc-siRNA construct ETXM1184 or with a vehicle (0.9% saline) at a dose volume of 5 ml/kg.

[1178] To induce knee bleed, mice were weighed and anaesthetised using isoflurane inhaled anaesthetic. Both legs were shaved to expose the knee joint. Mice were injected s.c. with buprenorphine at 10 ml/kg for analgesia and the diameter of both knees was measured with electronic calipers. Subsequently, both knees were wiped with 70% ethanol.

[1179] A 30 G sterile hypodermic needle was inserted into the infrapatellar ligament of one knee. The injected knee was randomised between left and right, and the injected side was recorded. Mice were removed from anaesthetic and allowed to recover in a warmed cage before being returned to the home cage.

[1180] Mice were monitored regularly for the first 6 hours and were injected subcutaneously with buprenorphine at 10 ml/kg for analgesia at 6 hours post injury. The visual bleeding score (VBS) of the injured knee was assessed at 72 hours and 10 days post-injury.

[1181] All mice were carefully inspected daily for clinical signs of excessive blood loss. Mice showing clinical signs of excessive blood loss, piloerection, withdrawing from cage mates or grimacing were killed for welfare reasons.

[1182] Mice were taken off study at 10 days post-injury.

[1183] A citrated blood sample was taken by cardiac puncture, under isoflurane anaesthesia, plasma prepared and aliquots frozen on dry ice before storing at −80° C. For that, blood was collected into 3.8% Sodium Citrate at a ratio of 1 to 9 followed by centrifugation at 7000×g for 10 minutes at 4° C. In detail, the following steps were performed:
[1184] 1. Collect blood by cardiac puncture.
[1185] 2. Flush the syringe and needle with sodium citrate solution (3.8%), leaving solution in the hub of the syringe (˜30 μl).
[1186] 3. Following blood collection, expel sample into a 1.5 ml microcentrifuge tube and ensure sufficient sodium citrate solution (3.8%) is added to achieve a 1:9 ratio of sodium citrate:blood. Add the sodium citrate solution to the side of the tube, not directly to the sample. Mix by inverting 4-6 times. If not centrifuging sample immediately, keep in a fridge if available or alternatively on a wrapped ice block and continue to invert the collection tube regularly.
[1187] 4. Centrifuge the samples as soon as possible at a spin speed of 7000×g for 10 minutes at 4° C.
[1188] 5. Remove all plasma from the sample and place into a fresh microcentrifuge tube.
[1189] 6. Aliquot the plasma into pre-labelled tubes (Thermo Scientific; 10775974) as follows:
   [1190] 30 μl for potential TGA assay
   [1191] 100 μl for potential APTT assay
   [1192] All remaining for potential target protein abundance analysis.
[1193] 7. Place all aliquots on wet/dry ice immediately.
[1194] 8. Transport samples on wet/dry ice.
[1195] 9. Transfer samples to −20° C./−80° C. freezer to be stored until use.

[1196] The liver was removed and up to 3 portions of each lobe were placed in RNA later and kept at 4° C. for 24 to 72 hours. Tissue was then blotted dry, weighed and stored at −80° C. In detail, the following steps were performed:
[1197] 1. Immediately after the cardiac puncture, kill the mouse by cervical dislocation.
[1198] 2. Make an incision into the abdominal wall and remove the liver as quickly as possible.
[1199] 3. Place the liver on a petri dish on wet ice, to minimise sample degradation.
[1200] 4. Cut 3×˜50 mg pieces of liver from each of the following lobes: left lateral lobe, medial lobe, right lateral lobe and caudate lobe. Place these liver pieces immediately into pre-labelled tubes (1.5 ml microcentrifuge tubes) containing 500 μl RNAlater, and place the collection tube on wet ice.
   [1201] a. Transport on wet ice and transfer to storage at 4° C.
   [1202] b. After a period of 24-72 hours, blot the liver samples and weigh. Record the weights on the terminal sheet.
   [1203] c. Transfer to −80° C. for long-term storage.
[1204] 5. Collect any spare liver and place into separate pre-labelled collection tubes (2 ml microcentrifuge tubes).
   [1205] a. Freeze on dry ice for potential future analyses.
   [1206] b. Transport samples on dry ice.
   [1207] c. Transfer to −80° C. for long-term storage.
[1208] 6. Clean all dissection tools between animals to prevent any cross contamination.

[1209] The skin was removed from the legs and the knee joint measured. Legs were subsequently placed in 10% formalin before decalcification and slide preparation. In detail, the following steps were performed:
[1210] 1. Following the removal of the liver, measure and record the diameter of both the injured and uninjured knee.
[1211] 2. Remove the skin from both knees. Carry out a visual bleeding score and measure knee joints.
[1212] 3. Dissect the legs from the top of the femur to the ankle joint and remove some excess muscle, being careful not to cause any damage to the knee and associated structures. Place the knees in pre-labelled tubes (7 ml bijou tubes) containing 10% neutral buffered formalin to be processed for histological analysis.

[1213] Both at day 3 and day 10 after induction of knee bleed, Haem A mice that received the GalNAc-siRNA construct ETXM1184 showed a significantly reduced visual bleeding score in comparison to Haem A mice that received the vehicle (0.9% saline) (see FIG. 10A&B). Furthermore, the knee diameter of mice that received the GalNAc-siRNA construct ETXM1184 recovered faster following the induction of knee bleed compared to mice that received the vehicle (FIG. 11A). This observation was confirmed by comparing the differences between the diameter of the injured and non-injured skinned knee diameter (FIG. 11B).

[1214] Analysis of the Haem A mice 10 days post injury further revealed less severe bone marrow hyperplasia (FIG. 12A), less severe osteoarthritis (FIG. 12B), less severe chondrocyte degeneration/necrosis (FIG. 12C), less severe haemorrhage (FIG. 12D), less severe haemosiderin deposition (FIG. 12E), less severe haematoma (FIG. 12F), less severe osteoclastogenic bone resorption (FIG. 12G), less severe osteolysis (FIG. 12H), less severe periostitis (FIG. 12I), less severe sub-chondral bone sclerosis (FIG. 12J), less severe tendon degeneration (FIG. 12K), less severe tendonitis (FIG. 12L) and less severe tenosynovitis (FIG. 12M) in mice that received the GalNAc-siRNA construct ETXM1184 in comparison to Haem A mice that received the vehicle (0.9% saline).

The application's sequence listing, which the Patent Office published only in electronic form, follows.

SEQUENCE LISTING (800 sequences)

SEQ ID NO: 1 - DNA, 19805 bp, Homo sapiens
  misc_feature 1..19805: note = Description of sequence: ZPI gene
  source 1..19805: mol_type = genomic DNA
aatgtgggttggagcccccatacagaatctctatgggggcactgcctagtggagctgtgagaagacggccaccgtcctccagacccctgaatggtagatccaccgacagcttgcgccatttatccggaaaagccacagacactcaacgccagcccgtgaaagcagccaggagggaggctgtaccctgcaaagccacaggggcagagctgcccaagaccaagggaagctaccttttgcatcaacgtgacctggactcaaaggagatcattttggagctttaaaatttgactgacctgctggatttcagacttgcatgggccctgtaaccacttcgtttaggccaatttctcccatttggaacagccgtatttacccaatacctgtaaccccattgtatctaggcagtaactagcttgcttttgattttacaggctcataggcagaagggacttgccttatctcaggtgagactttggattgtggacttttgggttaatgatgaaatgagttaagactttgggggactgttgagaaggcatgattggttttgaaatgtgaggacatgagatttggcagggccagaggcggaatgatatggtttggctctgtatccccacccaaatctcatcttgaattgtactcccataattcccacatgttgtgggaagggacccagtgggagataatttgaatcatgggggtggttccgccatactgttcttgtgatagtgaataagtctcacaagatctgatgcctttattgggggtttctgcttttgcgtcttcctcattttctcttgccgccaccaggtaagcagtgccttttgcctcccaccatgattctgaggcctccccagccacgtggagctgtaagtgcatttaaacctctttctcttcccagtctcgggtatgtctttatcagcggcgtgaaaatggactaatacactgtggttatgtattatagtcatatgatattttcatatttttggaagctgggtgaagggtagatgtggagaccatgatttttgcaaatttttttaagtttaaagttatttctaaattagaagtttaaaaagaagaaatcacataagccataacacaatagaaagatgtctttaaagttcaaggcaggagggatgtctggaaatcagcgagaaatttgcacctgtgtgtgcatgtgcatatgtgtgtgtgtatgttgcaaggacttggaaagccctttttttcctacctctgtactactgtggggggaggctaaacttgacttcttcccatcttagttcttttttgggatagactcctgtaacaaaagacagacaagagaaaaatcagcttacaacatgggccatgcacttcacacaggagaaacctgcatgaaaagtaactcaaaatggtgccttagaactccacttacctttagtaaagagcaataaattagcaggaaaatcatggatcgggacaagggaagtggttttatgcttccaagggcaggaaatcatggaaggtaaatatatgggaggaaactaaaggaataaggcttgtttgcatattcctctgatgccatctctgggttgataagagtctagagtcatttccagtaaagatgaatttttatctgtctttaggaagaaagggggaaagatagagaaaactatttctccatttgctgtttcttaattaccttcagttcaaaaataatttttatatcagaaaggcatatttagaggtatgttagtttattttcacactgctaataaagacatacccaagactgggtaatttataaagaaaaagaggtttaatggactcaccgttccacatggttggagaggcctcacaatcaaggcaggtcttacatggcagcaggcaagagggagaatgagagccaagcgaaaggaatttccccttaaaaatccccttataaaaccatcagatctcgtgagacttactcactaccacaagaacagtatgggggaaaccacctctatgattcaatgatctcccactgggtaccccccaacaacacgtgggaattatgggagctacaattcaagataagatttgggtggggacacagacagaccatatcaaggggtaacatagtctggtttcctttactacccacctacccaaacacccccttcatctgatccacacaaagtaaactcttgcagttctctcactgtttcctggagtctgcttttggtctcataggactgccctaacgcttgtttttcagacgtttaaccctgtaggtctctggacaaatttgctttagaagcccctcgatgtcgccctgaagagtggctttcagaagttgtgcctcctgcctgaggggagttccaggaagggttctgcatcgcctatgagtttatctggatcaccagaggccttcccgtcagagctttcccaatcgtttttggccaaggagtgtgagaagctaaagttcataacaactggaagtcagacagcctggtctattctgctttaactctagcaggaaaggccttcatggtggggcctgaatatcttcctttataaaatcaaagcctggggacagggttacttacttctgaggttcaatctggctctaaaattatgcaacaaatgccattcctttagcacttccttcctaccgggcgagatactcaactccacaggcaccacctcagttcatcctctcagaagtcctaacagctcagcctggggcaccccattttacagattagtaaactgaggctaagagaggttaggtagcttgttcagggtcatgctgctggtaaaagagctcaggctacagtgctatgcattgagttttctcactttcccatctaactggagggctaaaggtcaaagagtgggcagctcccttgttgggagctgtacaggaataatgtcctccctgaaggagggggacttctgagccacaccctggggtccagggctcacagccttaggagcaaaatcgtccacccccttcctggttcctcggtgctgcagagatattcataggacagagtctgagttctggccacttaacagaggaagaaaggctggctcggtgaggttaacttacatcccagcagctaggaaccgggagcagaggacctcagattcacaccagggcaggaggcaatggcctggctgaagccttcacaatcttcccaatatactccgctgccttcctttataaggatccatttctgaaaccctgtgccctggccaggcacggtggctcacacctgtaattccagtactttgggaggccaaggcaggaggaccacgaggtcaggagtttgagaccagcctggccaatatggtgaaaccccgtctctactaaaaatagaaaaattagcgtggtggcaggcgcctgtaatcccagctactcgggaggctgaggcaggagaactgtttgaacctgggaggtggaggtctcagtgagctgagacagacagtgcctgggtgacagacagagactccgtctcaaaaaaaaaaaaaaaaagaaagaaaccctgtgccctaagacctgcacactcgctggctccgctcagacatttagcaaagcagacaccttcccaggcctggaggaaacagcccctgctttttgggaatccacaagcccgcagctgcagagctcgacctggatgggcaggcaaaggctgactcctgtgcgtggtgtgagtccagcctggcccctctacaccctcactttcacctcttaaagaactgcctattaacagagcaggtactgcccaaaaggaacactctggaaacttgttgggacacttctgcctttcacaaacgtttggggggagtactactagcatttaaggattgagggttagcaatgccagacataccagaacacgcagggcagtctcccatgatgaagaggccgccgggttccccaggactcacatgtccacctcaagttcacgtgggattatctgagcctagactgtcagtcctggggctgctttatttcatataaaaatataatatttatccaaggttttactacacactgcattttctgtgaagacaatgaccgtgtaaatcagggaaagatctatattttattttgtttgaaactttaccaagcattatttaccatttcaaaagctctatccctggtagtaccattggttttcttgttcaccggccagcagtgagcagcacacaagcgacctcccgtgggctccacattggacagcctcactgcacctgcccaggcccttaggccacagcactgccatattcagggacacattattctcttttattatgcctccatattatcattacagcattatcttttttttaattttgtgggtagattatattagctatacgtttcacttcaatggtagtagtaaggggcacataacaaaatatttacttatatatattaaaaaagagagtctgagaagtctgaaaagttttgccataaacggtctccaccagcctcaactctgagtgcccgaggattcagtctcaagtccagcaacattgtgaagcaggaaatttaccttgaaaggagctatgtactctaagtagtgatttacctgtctgcctcccccactggattgaccagttccttgggggctgagagaacaggtcctgaacatttctgctgtgccccccaacccacatcctcatagtgtccagtaccaggctggggactcaggaagcatccatgggatcccccagtgccttctttctcgaggtgttcagcacctagaacagctcaagacaaattccccacaccccacccagacagagctgaatcttactggggcgaagccttgagttgcaaggcagaagctctcgtgatgggatttgggtcatattccgggttataggaggagctggggagtatgggaagcctcccacttggtctttggttttccagaaactccaccatcacaagcaggatgttaatcagtaaccgtcccacaggggatcatactttggaatagcaaatatttgctgaaggttctgggctgcaaagctgaagctttggtttctgctctaaatgaaggacttttccaggacccaaggccacacactggtaagaggcagtgggttacaggagaccttcaatgagtctaatcagggagggaccgggaaggatggtatcatccctgggcgggctccaacgtgagggctgtgtggctgagcagtgcaaagacctccatcctacactccacagggactgtacatacagattgggagctggagtggggtaagaggcgaattatagacacaaggggctcctctgcaggaaggaggccaagggaaagaggcttgaaaggcttgatatttcacccaccaccactcactgccggagtaagcaggtctccccttcccagggctgaggggaggcagggatgtgtgctgtcccagggctgagaagtggcaggtgagctggtgattccttactgcccaggttctgtctaggaaggtgcgtcctcaccatgctggatggtgtcctagtccaggagcaccccctgagctcctggcctagactccaaagggttgggtagatgagcaaagactttacaaagaccttaggcgatatatgtccaggagcacccaggaattactgggctaccactgcagactgcaggacaagctccaagaacaggaaggtaagactcagcatttggaggtggtgacatctagttggcgtgctgggctaatttcctgaccattgtacagggagaagtaaccttgaattcaggagtattctgtgtggtcttaatgtagaaagtagcactaaatgatgccacgtaatcgttttagctcaggctcctctaacaaaacaccacaggctgggtggctccaacagccattgatttttcacagttttggaggctgaaagtccgagtcagggtgccagcgtggccggattctggtagggctgtcttcttggcttgcagatggccaccttcgcaccgtgtcctcccatggagaggaggtgcggagggggactctgctctcttcttatgacagcactagtgctatcacaggggccttgccctcacgacctcatctaaacctaatcacctcccaagcgccccaactctattgccatcacaatggtggttcgggcttcaacttattaattctcaggggacacattcagtccataacaataaaagcgtgaaactgggctgcgtttacactgaaagagctatttacccaacgtttacaatacttgggtgacctgttgaatgcaggcttgccatttagagtcaaaaagagcttcctcaacagtgtcctttgggaaacacagtggaagtatttcactgcttctacaggggagagggtagtgccgttcagactgcagagtgaggccctgaattccggggtgccattcagcccgagcaaggggcaacatgctgggccctggcgctggaggcggttttgtcccaggcatagataaggactcagcccctgcatcaggaagaggcctggcagcaccgcctgtcaatacattttgccgcaggtgaccttggtcaagaataagggtctctgctgatgggaactactgtgaggccggcagcatccaccctgcgctcactgggctgggtggcctaccccacccagaccctcccagggcagtgggcccagagagaggatgagggagggcaggtgtcccaggggttctgcccagccagcctctgggatcaggcctgcagtgtggctgaacaccagaactgagtttggacacagccaggtggcccaggccagtcccaagccatgtatttggatggaaaacatggaagtattcaggagccaggctctgtgtccaaggatgtggagggagcctaaaaggcgacagagaaggggacagctaacggtgaagaagtgtagctcccacactgcagcctaggacagtgagaaccggcatgcagcccaggtggctgagggctctatgaagccacagtggagggagcccagaagtgggttgtatgaattgcggggcctcctgctacccgggagctgcagctataggaaggaaggaaggaaggaagacctccaaggaactgtgtagcagaggtgcagtgcaaagagaattttgataaaaaatccaggaaagctccaatactttcccccttccttgcctaacgggcatgcaggcactccaatccccagccaaacagggcactgggcaaggccggccacccatctggatgggcagcctgacgaccagatggtcagggcagtgaatgaagcagatcaaggaaaggtgtgtgaggacccctgattccacctgcttggacccccaccttctgtgctgcctcctgctcccagagtggactctcttgccctggccctcagggaggagacgggatgaatgaaaacggggtcaggactgagagctgcctgccggcctggcagggaatgggaactggaggaggttttgctctgtgaaataatgtcccctctttgggtgagcaaatgtcacccacacttgctctaggtctccctggggcagggctaacctacttgagccacaggaaggaggcagggtccctgaagaagcttttactatccacaaagacattttaggaggcattaaaaccatctctatcctctcctctccacaggaagtcttgcagctgaagggaggcactccttggcctccgcagccgatcacatgaaggtggtgccaagtctcctgctctccgtcctcctggcacaggtgtggctggtacccggcttggcccccagtcctcagtcgccagagaccccagcccctcagaaccagaccagcagggtagtgcaggctcccaaggaggaagaggaagatgagcaggaggccagcgaggagaaggccagtgaggaagagaaagcctggctgatggccagcaggcagcagcttgccaaggagacttcaaacttcggattcagcctgctgcgaaagatctccatgaggcacgatggcaacatggtcttctctccatttggcatgtccttggccatgacaggcttgatgctgggggccacagggccgactgaaacccagatcaagagagggctccacttgcaggccctgaagcccaccaagcccgggctcctgccttccctctttaagggactcagagagaccctctcccgcaacctggaactgggcctcacacaggggagttttgccttcatccacaaggattttgatgtcaaagagactttcttcaatttatccaagaggtattttgatacagagtgcgtgcctatgaattttcgcaatgcctcacaggccaaaaggctcatgaatcattacattaacaaagagactcgggggaaaattcccaaactgtttgatgagattaatcctgaaaccaaattaattcttgtggattacatcttgttcaaaggtactttgataatgttctgctctcccaaggccacagggccctacgattgtctctccctttcctttcgttaggccagcatatgattaacgctacgtgattttctatgaatgtgttttcacgtttcaaaaacagattgatacacatattgaacagtgccagacgctgtcatttgaggcccttccctggtatcctatgtgcttgtagtccttattattttcagagcactctacatagctcccctctgacacttagaagcatagggtctttccaaaaaacagggggctgggggattatctgggggatttaggattgcatcattgctccttcatttttactttttgaccaactctctgcccttagattcctattatagaaaatagggacactccacctactacagtgttagaggctaaatgagacaatgaatgtaaagtgcccagatgggcttggcacatagcagacactgagtatctattgtttacttgttcttccaaactgccaatcagcaggtagagcaggagttgtctcctttctaaagatgaaaccagctcagagacgttagcttgatcaaggtcacacagtaagtggcagaggcaaaacccaaacaagggcctcctgaccccctgatcctaggttctgtccagccctgcctccctaatggggcactggacgtgggttggatgccactttcgcagagctggcaccagacttacaaagccccggcaggggaagccactttacaaccagccaggccacacccccagggcagacgtttatgtagagagtaatgtacctgcctgctagtagcctctgcattgtggggccttctctcagaaccacactaaacagtgggtgggtgagaagtgtcactcctgccaccttggactctgcatgtgcttgtgcctggtgtgaatgagacaaagtggcagtcagaggtgccaggcaaaggcttttctctaagctggagccaactatgagggaacgactgtgaattccgttcaggtccaggacaatgagaggagccagggattgttaggaaacatttccctgctttcgtgtgcgattcccaatagggcctgcgagtggagctgcattttgctagctgggctagaggacggggaaaattttggggaaatttattttgcctgcctgagctgtggaaaagccaacccaattagggaacgcctttcctagttggaacgagaagacgagaagtgagagaagtgagatagaaggctccctctctattatttgagcaagaacaatgcttttcaaagagggaatttctgcaatgagttcttctcttacttgttcagggaaatggttgaccccatttgaccctgtcttcaccgaagtcgacactttccacctggacaagtacaagaccattaaggtgcccatgatgtacggtgcaggcaagtttgcctccacctttgacaagaattttcgttgtcatgtcctcaaactgccctaccaaggaaatgccaccatgctggtggtcctcatggagaaaatgggtgaccacctcgcccttgaagactacctgaccacagacttggtggagacatggctcagaaacatgaaaaccaggtacaactcttgcccacaccctatacaaactctacctttctgtactggcaaacgctcagcacaatttcattgaatgcaccgtgatttaatgtctcctccagtgagctataagtttcctgaaggcagggcagcatttgtctttttttccactctatccccagcatctgtcacagggtgcctggctgattcattcattgagtccatcagtattttacgttctgcgactgtgataaatatatgatgccagggatccatcagcaaacaaaacaggcaaaattagtctgccctcatgcagcttacattctattgaaggaagacaaagagtaaattaaaaataggtaataatgcagggaaggggacaagaagcatcatcaggatgcagatggaggttagacaaggcctctccaagaaggtaacagtaagcaaacatctgaagatgaaggataaaccatgtggatatattcggggagagaagtgttatgttacaggcagaagtgtacaagttctgggatgggagtgtacctggtgggtttgaagaacatcaaggagacaagtgtggcttcagcagttggagataaaatcagagaggaaacaggggcccagtccccagaaaagacttgggctttcctgagagaggcaggaagccactggatggttctgagtagaggagcaacctgattttgacttctgtttttaaaggatcacataagctcctgtgttgagaaaagacactagggggtaaggatggaagcaagggagagtggttagaaagttactagcaatccaggtagagatgctgctacctggactgcggtggtggtagtggaagtggtgagaagtggctggattctggatctattaggaagtgcaggatctgctaatcgattggatgtgggtgagagaggtgtcaaaggtgatcacaaagtttttggccttagcaactggaaagacggatttgccatttactgaaagggggaggaacaggtctggggtaagtgcagaagttcagtcttaaacacttggatcagaaatatctattagacatccaagttgagatgtcaagacgacaggtggatctggagtctagggtgaggtccaggccggagatataaattcggtcatcaacacagaactagaatctagacacatgacagggttggggtctgtaaatatagaggagaggaaaagaaagcacagagtgggcactgaaatgtctgcccaataaattaatccacctattggagtacaaggaaaatggctgcaatacgaattccatggctatggcttctgaatcctgtgactcagattttggcagacaagtgcagctaaaggtccccagggttagttttatcttcattattcttctttcatttttcttcatatctttagcacctaacaatgaaccccaaacatcataagccctcaagtaatgtttgctgaatgaataactttttaaattaatcttcaagacacgtcatgtcctcaattatttttaaataaataaaaaaattttattttgagccacagaactcatcttttcaagcaacatattttcaaaggaggactccagtatacaaaatagatggtatcagagcttctctggctaaagacgggtaggggttgaaagttttctttgctcccctccccatccatccccagactcctcgggtctgcagaatccaggagctgaaaacagccatcatccaggaggctgcaggactgctgaaagcagctgttaactcaggttttttttaaaatatagggaaatgaacacataagtactttgctaaagaaaacgtgagtcactggctgaggaataaaactcattcactgaagctgaagtactatttgataagctagaaatattttccctgagtagaccactgtaaaagaatggcatgaactacatagtcaactgaaagactcattaatggaaataatcttaaagaacaaaaattgtgacctttttggtgtccacagactagggctttgtctacatttcaccatcatctgttcttgtaccacagaaacatggaagttttctttccgaagttcaagctagatcagaagtatgagatgcatgagctgcttaggcagatgggaatcagaagaatcttctcaccctttgctgaccttagtgaactctcagctactggaagaaatctccaagtatccagggtaagtcaggatctttcatcagagcccaacctcagcatgaaatgtcaccaaaacaaatgcttttacaaaccatttaactttgataaaatacctaattgtagtggaaaattagatttaagtcccaaatacttgaaatagcacccaggttggatgttttaagaatttcaagcaacttcattaaaataacttttcaactaatttattttaagcagacctctccccctctgcttaaagtgctcagggagaaatttgaccctgaaatagaactggtttacagaggcatcatcatttatgttgaatacaacttgaatagttcatgaaattacaccacctttacaatgaaacaaacccctagacatcatctagcccaacttctccctccttgtggaaatcccctccatagccctacgaaatagccctccaacttctcttcctcttcatgcttccagtgacatcaaactcaccatttctttgaagagctgcccaatccacaaatagctaaaattgttatatgtatatatatatatgtgtgtatatatatgtatatatgtatgtgtgtataaatgtatatgtgtgtatatgtgtgtgtgtatatatatatacacacacatatatatatatatggagagagacatacatatatatatggagagagagagagagagagtcctgtaacttctgattcatactttttggtcctagttctatctctaaaacttctaagaacaagtttagtcaccatccacatagaatcccttcagttactcagtgtttctcagtggaagggttcttggttttgaggggaactgcttgttgtccagagcagttgtgcatgttgcagggaactggttagcattgctggcccatgttcactaatgccagtaggaaactccagtcatcactataaaaatgctcccacacatttccaaatggcagctacatctctctacattcttccttagctgtgtggtttaatattttcttatacaattgcaattttcaattccaagagagactaaaaatggcatccacttaagtaggacacagtagggtaactgtggcctggaatcaggtcttacaacctcaagagaggtaagacaattaaataaaacaatccgtcagaccagcacctgaaagtgtttctgctatgaacacatgaaaaactgaaatgcgctgctgctttatgaagggtcatcatgaaatttaaactgtaaatgattaaatattctccctctgtttgctctggggaattaattttcctctaggaaatcagggaatttcctggagtgaaaatcagtgtaattacatgttatgttttcattatctcttataacacagtaattatataggtacatcactcatatcacatcttgtttctgtaaaaaagggcctcccaaacatagcaagcagccacagtataggcagccagaattcaggaaggctccagggacccctgggcttggcccagaaaaatgcctcagagtagtaccaggtgctgggaagctgctacagaagactagccattccctgcctccaccttgcctgccaaaaggaaagtcagaggactcaagggatccagggatcaagggatccaggcagcttgaaaaccttttaggagcaccagctcagctcaagaattagtagcataaattacatgctcaataaagatttgatgcatgagtgcatcctgagtccatgcccggaatgtgtttcacatattccacaatacttcacattgggttcctgaggtctcctggtattgtttaagactcctgtggcagtccctggtgcaaccccagaccactcctcttaacgtagatgggcctgctccactaaatcccaggagcatgaccccatgggtaggaccactgtgaagaatttcaaggggctcatttaattcctcctttgcactgccacacaaatggtttttcacattatttcctttttccaggttttacaaagaacagtgattgaagttgatgaaaggggcactgaggcagtggcaggaatcttgtcagaaattactgcttattccatgcctcctgtcatcaaagtggaccggccatttcatttcatgatctatgaagaaacctctggaatgcttctgtttctgggcagggtggtgaatccgactctcctataattcaggacacgcataagcacttcgtgctgtagtagatgctgaatctgaggtatcaaacacacacaggataccagcaatggatggcaggggagagtgttccttttgttcttaactagtttagggtgttctcaaataaatacagtagtccccacttatctgagggggatacattcaaagacccccagcagatgcctgaaacggtggacagtgctgaaccttatatatattttttcctacacatacatacctatgataaagtttaatttataaattaggcacagtaagagattaacaataataacaacattaagtaaaatgagttacttgaatgcaagcactgcaataccataacagtcaaactgattatagagaaggctactaagtgactcatgggcgaggagcatagacagtgtggagacattgggcaaggggagaattcacatcctgggtgggacagagcaggacaatgcaagattccatcccactactcagaatggcatgctgcttaagacttttagattgtttatttctggaatttttcatttaatgtttttggaccatggttgaccatggttaactgagactgcagaaagcaaaaccatggataagggaggactactacaaaagcattaaattgatacatattttttaagatgtttgtgcaatctgtctggtattttaagcttgtttctaagaaccttagttacttggctaaagactagctgggtagaatatcttttctctgttgctcacatattttcatttttaaaaagttgcagatgagaacactatgtcaagataaagcctttgggaggaacacatgtaaacattctccttgagtcatgtgcttctctctctttccttctctctggtgcaaaataagtgttttattttaatctattacggagtcatttcttgctgactgacatcagaagaaaatagctctaaccagtcctgatcacagcatctgcttccatggtgcatcaaatcgcttggcagaggcattggctgaatcacagatcatctagttcaataccttcattttacaaaggaaagaaagagggacccagaaacaggtccatattcttactttcatgggccctaggcacgtttaaccttgtagactcctccttccttcatgaagatatatatgttctatggctgcattggtagaaagatgaatatattcgtctttcaaagttgcatatctagcttcaaagttatatgtctagcatatggcaataagcaaaacaccttcatgggcccttacagtactgtcagccttgggcactgtgtcttctgcatctagtggataagtcataccttatataccagtgggaacaaaatacttgtccaaggtcttccagtgtggcaatggcagagtcagaagcctacctttcctgagtctagtctccaagccctttttactcttccttccatctaaaacatctgatggggaccaggtaaacagcatgcactacagctacccatgggggttaaacagaatataagcatgaactttgtcccagggtgaaaaggaaaatcgtaaatatccctgatcttccttaggcagttattttctgtcacagaaacagaaaagactatattcagagaatcctgaatagagctgatttacagtgtgaactatgttaactaaatgcctaattggatttctgtctgtctgctatctaatgtttaaaaaaacctaaaattcatttattgattagttgtttaatataattcagagtaatgtgaataggtaataatattaatatgcagtctaaatactgacttttcatcattccataacctggactgatgaaaagtcagtatttagactgcatattaataaaataaaattcattcctgtattcattccaagagtactaattgacacttatgaagggacaggcaattctaggccctagagggccaaagacagaggactaactctatctgacattcttaagtcaccttgtttgtgttcaattagtcagatttgtttgtggaaaaatagtagaaagaggaataaagtagcatccagtccaatttcccacttttaagagatgaaatctggaaaaataagtctgtgagagcacaatactcactgaaatcaatatggccaaacccagtaataaaaaggtacattattattgaaggattcatatagcatgcagataaaaaactcctgccttcttcccaccacatacactgcaaagcaacaacagcataataattgtatttaatatactactctttaaggtagaaaatggacctattctatattttaaatatactttttaatgttccctcacatttgctttaagaagttcctaagacactcagtttcagatttcccaagtacacaggcatgacagaaaaacgcagaccaataaaaaatgtaacttaccttacacaaatacatacacacaaattcagggtttccaaccgagcgggggaaatcttaacattgtagaagtcttcactatatatgtgtcgagtttttgtttttgtttttgtttttgttttgagacagagtcttgctctgtcacccaggctggagtgcagtggtgcgatctcagctcactgcaacctccacctcccgggttcgtgccattctcctgcctcagcctcccgagtagctgggactacaggcacctgccaccacgaccggctaattttttgtattttaagtagagatggggtttcactgtgttagtcaggatggtcttgatctcctgaccttgtgatctgcccgcctcggcctcccaaagtgctgggattacaggcatgagccaccacgcccggccaagtgtcgagtcttaaaaattgttcctacacagacacactcaaccacacgttctcacatatatatgctgtaacaactgagaacaggttactgacttaatctaattcattctatcttcattgtaaaacttccactccagctgaagagcctgtttcatttcaattcaaagatttctcatatatccactaattgtatggcaaaactgactcatctccagactaagatattcaagctcaggaagtcaaataatagaaatgattttttaaatgtgtaagaggttataaagaaaaactttatgtgctccttatttaacctctattaagtaaaatcctttatagacctatctccatttctgcagtaaaagtgagctctacagttagcttgtaaggctaactagtgaaattcctggacttgttcttaaaaatgcaagttttagtaattaacaaaatgatgatgaagatgtcccttttccctacaactacagatggagggagatttttctttgccatacaactagcttaaaggattaatttgataagttgttaaactgagaactttcacaaaagtatccatcttgtttttgatataaatggagatacatgtagttattcataactgtcagtaatttgctgtttatcctgtttctatatatctgtccttgagagtataattttaataaatatttcaaagattttaggaaatgtcatgttctgttaaaaaacttccaaaagtaattttgatgaacagttttgataacttagtactaactaggactaagactgcaattgactgctctacattcctgaactttataagcagtagttgtttctctctgtcaaatcagtgtccccttttcccatttgcatcatgggaaagtgaaaccttataattctgctaaatttattataacaaatacattgaaattctccattttattaaattaatagaatgttatgaatcaaagcaccaaaaaaactgatgcaattttgatgtctcgttctgtaccacattctccagatcttaatatattcagttccacattattggtgctagtaggagacataatgaaaacagttaaatgaaatccacagcgagtatactgattaaccagtactgtcaaatttctcatacctattgaattttaactactgacaaaatgagcagtaacaattccatttacctgattgtcctttggcaaaggatattattaagaatcactaaaaatagccataaagaagccatatggaaggaagaaggaaaacaaatggcatgaaaaggtctctcactgagtaactatgctcttatagttgacgctggtatatttcttttattcactacctaaaaatgaactatcttactctttaattatagaataaaaactgcaggaaagtatttaagactttttttcacaaacacaggtatctcattaacctatgttttattttgagtaaattcattattcattatttcacattataaaaagtaaccacacatacatatgcattcacaaattagatcatctttatcatacatcaatatattttaaaaaacaaatatcttctaatatcaatatagttatatgctgattgcattttgaaatagagaagctgacaatagcttcacacggtatatctcaagaactgacagtttaaaattaagaactgtatatattccacaggcaaattttgatggaaatattagcattagtacaaataaatgctgttgacatagcttaagcatgatagcttggaataacagctgattcagactagattcatcattttaaataaagacaagtacaatctaaaatgtaaacaaagtatttataaaataaattctctaggaaataaagaaaatcatcaatctattatttttaaggtatttatagctcaaagttaccagaaatctttgtggaattttcactgccaaatttaaatttgggaatgtccgggtacaacatattgtcaccacaatccggagggccgccaaaatcgcagacggctatttgcatcctttcagtgtgacttttcaagtgggcttggagactcatgagaaaatgcagtatctttctcaccttccaagtccccctccaagtgcttatcaagctaggacaattcagctgatgtagactttcatacgatttttaaatgctaaaactctagaacaattaaatggctggtttcctgcacaaataaatgcagacttgtctcttttgcagcagtggttaaagcacattcctagagatgtttttcattacacttcactataacattggaattccgtaaccacattattactcaagaaatatatattatacctcctagggaatctaatttgaaatatgaaaagtttaacatcagctgtcattatgtctctctttctgctcattaacaacaacaaaaaaaaaaacccaaaatttaaaaacaaagccccagccactgctttagcttttgtgtaccaatcacattatctcctgctgcctttgttttgcctccttcatcaagcagttgatttaaggattggattttctggattttctttgggaagaaagaaatgaaggaagagagggagggtggggaaggagggagtgagaaagggagaaaaagaaaaaaatatgaaaaatgttattcatataatgtgtacaaagtaaattaaaaatatatagatactctactttgaataattctaatatatgagaagt

SEQ ID NO: 2 - RNA, 23 nt, Homo sapiens
  misc_feature 1..23: note = Description of sequence: Description: ZPI mRNA target sequences: starting position on NM_016186.3: 991
  source 1..23: mol_type = mRNA
tttgccttcatccacaaggattt

SEQ ID NO: 3 - RNA, 23 nt, Homo sapiens
  misc_feature 1..23: note = Description of sequence: Description: ZPI mRNA target sequences: starting position on NM_016186.3: 756
  source 1..23: mol_type = mRNA
gctgcgaaagatctccatgaggc

SEQ ID NO: 4 - RNA, 23 nt, Homo sapiens
  misc_feature 1..23: note = Description of sequence: Description: ZPI mRNA target sequences: starting position on NM_016186.3: 1390
  source 1..23: mol_type = mRNA
atgctggtggtcctcatggagaa

SEQ ID NO: 5 - RNA, 23 nt, Homo sapiens
  misc_feature 1..23: note = Description of sequence: Description: ZPI mRNA target sequences: starting position on NM_016186.3: 757
  source 1..23: mol_type = mRNA
ctgcgaaagatctccatgaggca

SEQ ID NO: 6 - RNA, 23 nt, Homo sapiens
  misc_feature 1..23: note = Description of sequence: Description: ZPI mRNA target sequences: starting position on NM_016186.3: 1531
  source 1..23: mol_type = mRNA
aagtatgagatgcatgagctgct

SEQ ID NO: 7 - RNA, 23 nt, Homo sapiens
  misc_feature 1..23: note = Description of sequence: Description: ZPI mRNA target sequences: starting position on NM_016186.3: 1156
  source 1..23: mol_type = mRNA
ctgtttgatgagattaatcctga

SEQ ID NO: 8 - RNA, 23 nt, Homo sapiens
  misc_feature 1..23: note = Description of sequence: Description: ZPI mRNA target sequences: starting position on NM_016186.3: 1162
  source 1..23: mol_type = mRNA
gatgagattaatcctgaaaccaa

SEQ ID NO: 9 - RNA, 23 nt, Homo sapiens
  misc_feature 1..23: note = Description of sequence: Description: ZPI mRNA target sequences: starting position on NM_016186.3: 1159
  source 1..23: mol_type = mRNA
tttgatgagattaatcctgaaac

SEQ ID NO: 10 - RNA, 23 nt, Homo sapiens
  misc_feature 1..23: note = Description of sequence: Description: ZPI mRNA target sequences: starting position on NM_016186.3: 1161
  source 1..23: mol_type = mRNA
tgatgagattaatcctgaaacca

SEQ ID NO: 11 - RNA, 23 nt, Homo sapiens
  misc_feature 1..23: note = Description of sequence: Description: ZPI mRNA target sequences: starting position on NM_016186.3: 1160
  source 1..23: mol_type = mRNA
ttgatgagattaatcctgaaacc

SEQ ID NO: 12 - RNA, 23 nt, Homo sapiens
  misc_feature 1..23: note = Description of sequence: Description: ZPI mRNA target sequences: starting position on NM_016186.3: 1154
  source 1..23: mol_type = mRNA
aactgtttgatgagattaatcct

SEQ ID NO: 13 - RNA, 23 nt, Homo sapiens
  misc_feature 1..23: note = Description of sequence: Description: ZPI mRNA target sequences: starting position on NM_016186.3: 988
  source 1..23: mol_type = mRNA
agttttgccttcatccacaagga

SEQ ID NO: 14 - RNA, 23 nt, Homo sapiens
  misc_feature 1..23: note = Description of sequence: Description: ZPI mRNA target sequences: starting position on NM_016186.3: 758
  source 1..23: mol_type = mRNA
tgcgaaagatctccatgaggcac

SEQ ID NO: 15 - RNA, 23 nt, Homo sapiens
  misc_feature 1..23: note = Description of sequence: Description: ZPI mRNA target sequences: starting position on NM_016186.3: 1389
  source 1..23: mol_type = mRNA
catgctggtggtcctcatggaga

SEQ ID NO: 16 - RNA, 23 nt, Homo sapiens
  misc_feature 1..23: note = Description of sequence: Description: ZPI mRNA target sequences: starting position on NM_016186.3: 993
  source 1..23: mol_type = mRNA
tgccttcatccacaaggattttg

SEQ ID NO: 17 - RNA, 23 nt, Homo sapiens
  misc_feature 1..23: note = Description of sequence: Description: ZPI mRNA target sequences: starting position on NM_016186.3: 759
  source 1..23: mol_type = mRNA
gcgaaagatctccatgaggcacg

SEQ ID NO: 18 - RNA, 23 nt, Homo sapiens
  misc_feature 1..23: note = Description of sequence: Description: ZPI mRNA target sequences: starting position on NM_016186.3: 995
  source 1..23: mol_type = mRNA
ccttcatccacaaggattttgat

SEQ ID NO: 19 - RNA, 23 nt, Homo sapiens
  misc_feature 1..23: note = Description of sequence: Description: ZPI mRNA target sequences: starting position on NM_016186.3: 1157
  source 1..23: mol_type = mRNA
tgtttgatgagattaatcctgaa

SEQ ID NO: 20 - RNA, 23 nt, Homo sapiens
  misc_feature 1..23: note = Description of sequence: Description: ZPI mRNA target sequences: starting position on NM_016186.3: 990
  source 1..23: mol_type = mRNA
ttttgccttcatccacaaggatt

SEQ ID NO: 21 - RNA, 23 nt, Homo sapiens
  misc_feature 1..23: note = Description of sequence: Description: ZPI mRNA target sequences: starting position on NM_016186.3: 763
  source 1..23: mol_type = mRNA
aagatctccatgaggcacgatgg

SEQ ID NO: 22 - RNA, 23 nt, Homo sapiens
  misc_feature 1..23: note = Description of sequence: Description: ZPI mRNA target sequences: starting position on NM_016186.3: 1387
  source 1..23: mol_type = mRNA
accatgctggtggtcctcatgga

SEQ ID NO: 23 - RNA, 23 nt, Homo sapiens
  misc_feature 1..23: note = Description of sequence: Description: ZPI mRNA target sequences: starting position on NM_016186.3: 989
  source 1..23: mol_type = mRNA
gttttgccttcatccacaaggat

SEQ ID NO: 24 - RNA, 23 nt, Homo sapiens
  misc_feature 1..23: note = Description of sequence: Description: ZPI mRNA target sequences: starting position on NM_016186.3: 992
  source 1..23: mol_type = mRNA
ttgccttcatccacaaggatttt

SEQ ID NO: 25 - RNA, 23 nt, Homo sapiens
  misc_feature 1..23: note = Description of sequence: Description: ZPI mRNA target sequences: starting position on NM_016186.3: 1370
  source 1..23: mol_type = mRNA
cctaccaaggaaatgccaccatg

SEQ ID NO: 26 - RNA, 23 nt, Homo sapiens
  misc_feature 1..23: note = Description of sequence: Description: ZPI mRNA target sequences: starting position on NM_016186.3: 1158
  source 1..23: mol_type = mRNA
gtttgatgagattaatcctgaaa

SEQ ID NO: 27 - RNA, 23 nt, Homo sapiens
  misc_feature 1..23: note = Description of sequence: Description: ZPI mRNA target sequences: starting position on NM_016186.3: 994
  source 1..23: mol_type = mRNA
gccttcatccacaaggattttga

SEQ ID NO: 28 - RNA, 23 nt, Homo sapiens
  misc_feature 1..23: note = Description of sequence: Description: ZPI mRNA target sequences: starting position on NM_016186.3: 760
  source 1..23: mol_type = mRNA
cgaaagatctccatgaggcacga

SEQ ID NO: 29 - RNA, 23 nt, Homo sapiens
  misc_feature 1..23: note = Description of sequence: Description: ZPI mRNA target sequences: starting position on NM_016186.3: 1155
  source 1..23: mol_type = mRNA
actgtttgatgagattaatcctg

SEQ ID NO: 30 - RNA, 23 nt, Homo sapiens
  misc_feature 1..23: note = Description of sequence: Description: ZPI mRNA target sequences: starting position on NM_016186.3: 1388
  source 1..23: mol_type = mRNA
ccatgctggtggtcctcatggag

SEQ ID NO: 31 - RNA, 23 nt, Homo sapiens
  misc_feature 1..23: note = Description of sequence: Description: ZPI mRNA target sequences: starting position on NM_016186.3: 987
  source 1..23: mol_type = mRNA
gagttttgccttcatccacaagg

SEQ ID NO: 32 - RNA, 23 nt, Homo sapiens
  misc_feature 1..23: note = Description of sequence: Description: ZPI mRNA target sequences: starting position on NM_016186.3: 1383
  source 1..23: mol_type = mRNA
tgccaccatgctggtggtcctca

SEQ ID NO: 33 - RNA, 23 nt, Homo sapiens
  misc_feature 1..23: note = Description of sequence: Description: ZPI mRNA target sequences: starting position on NM_016186.3: 1384
  source 1..23: mol_type = mRNA
gccaccatgctggtggtcctcat

SEQ ID NO: 34 - RNA, 23 nt, Homo sapiens
  misc_feature 1..23: note = Description of sequence: Description: ZPI mRNA target sequences: starting position on NM_016186.3: 761
  source 1..23: mol_type = mRNA
gaaagatctccatgaggcacgat

SEQ ID NO: 35 - RNA, 23 nt, Homo sapiens
  misc_feature 1..23: note = Description of sequence: Description: ZPI mRNA target sequences: starting position on NM_016186.3: 986
  source 1..23: mol_type = mRNA
ggagttttgccttcatccacaag

SEQ ID NO: 36 - RNA, 23 nt, Homo sapiens
  misc_feature 1..23: note = Description of sequence: Description: ZPI mRNA target sequences: starting position on NM_016186.3: 1385
  source 1..23: mol_type = mRNA
ccaccatgctggtggtcctcatg

SEQ ID NO: 37 - RNA, 23 nt, Homo sapiens
  misc_feature 1..23: note = Description of sequence: Description: ZPI mRNA target sequences: starting position on NM_016186.3: 762
  source 1..23: mol_type = mRNA
aaagatctccatgaggcacgatg

SEQ ID NO: 38 - RNA, 23 nt, Homo sapiens
  misc_feature 1..23: note = Description of sequence: Description: ZPI mRNA target sequences: starting position on NM_016186.3: 1386
  source 1..23: mol_type = mRNA
caccatgctggtggtcctcatgg

SEQ ID NO: 39 - RNA, 23 nt, Homo sapiens
  misc_feature 1..23: note = Description of sequence: Description: ZPI mRNA target sequences: starting position on NM_016186.3: 1321
  source 1..23: mol_type = mRNA
tttgcctccacctttgacaagaa

SEQ ID NO: 40 - RNA, 23 nt, Homo sapiens
  misc_feature 1..23: note = Description of sequence: Description: ZPI mRNA target sequences: starting position on NM_016186.3: 1323
  source 1..23: mol_type = mRNA
tgcctccacctttgacaagaatt

SEQ ID NO: 41 - RNA, 23 nt, Homo sapiens
  misc_feature 1..23: note = Description of sequence: Description: ZPI mRNA target sequences: starting position on NM_016186.3: 1285
  source 1..23: mol_type = mRNA
accattaaggtgcccatgatgta

SEQ ID NO: 42 - RNA, 23 nt, Homo sapiens
  misc_feature 1..23: note = Description of sequence: Description: ZPI mRNA target sequences: starting position on NM_016186.3: 1364
  source 1..23: mol_type = mRNA
aactgccctaccaaggaaatgcc

SEQ ID NO: 43 - RNA, 23 nt, Homo sapiens
  misc_feature 1..23: note = Description of sequence: Description: ZPI mRNA target sequences: starting position on NM_016186.3: 1360
  source 1..23: mol_type = mRNA
ctcaaactgccctaccaaggaaa

SEQ ID NO: 44 - RNA, 23 nt, Homo sapiens
  misc_feature 1..23: note = Description of sequence: Description: ZPI mRNA target sequences: starting position on NM_016186.3: 1359
  source 1..23: mol_type = mRNA
cctcaaactgccctaccaaggaa

SEQ ID NO: 45 - RNA, 23 nt, Homo sapiens
  misc_feature 1..23: note = Description of sequence: Description: ZPI mRNA target sequences: starting position on NM_016186.3: 1324
  source 1..23: mol_type = mRNA
gcctccacctttgacaagaattt

SEQ ID NO: 46 - RNA, 23 nt, Homo sapiens
  misc_feature 1..23: note = Description of sequence: Description: ZPI mRNA target sequences: starting position on NM_016186.3: 1255
  source 1..23: mol_type = mRNA
gtcgacactttccacctggacaa

SEQ ID NO: 47 - RNA, 23 nt, Homo sapiens
  misc_feature 1..23: note = Description of sequence: Description: ZPI mRNA target sequences: starting position on NM_016186.3: 1259
  source 1..23: mol_type = mRNA
acactttccacctggacaagtac

SEQ ID NO: 48 - RNA, 23 nt, Homo sapiens
  misc_feature 1..23: note = Description of sequence: Description: ZPI mRNA target sequences: starting position on NM_016186.3: 1361
  source 1..23: mol_type = mRNA
tcaaactgccctaccaaggaaat

SEQ ID NO: 49 - RNA, 23 nt, Homo sapiens
  misc_feature 1..23: note = Description of sequence: Description: ZPI mRNA target sequences: starting position on NM_016186.3: 1363
  source 1..23: mol_type = mRNA
aaactgccctaccaaggaaatgc

SEQ ID NO: 50 - RNA, 23 nt, Homo sapiens
  misc_feature 1..23: note = Description of sequence: Description: ZPI mRNA target sequences: starting position on NM_016186.3: 1258
  source 1..23: mol_type = mRNA
gacactttccacctggacaagta

SEQ ID NO: 51 - RNA, 23 nt, Homo sapiens
  misc_feature 1..23: note = Description of sequence: Description: ZPI mRNA target sequences: starting position on NM_016186.3: 1284
  source 1..23: mol_type = mRNA
gaccattaaggtgcccatgatgt

SEQ ID NO: 52 - RNA, 23 nt, Homo sapiens
  misc_feature 1..23: note = Description of sequence: Description: ZPI mRNA target sequences: starting position on NM_016186.3: 1320
  source 1..23: mol_type = mRNA
gtttgcctccacctttgacaaga

SEQ ID NO: 53 - RNA, 23 nt, Homo sapiens
  misc_feature 1..23: note = Description of sequence: Description: ZPI mRNA target sequences: starting position on NM_016186.3: 1261
  source 1..23: mol_type = mRNA
actttccacctggacaagtacaa

SEQ ID NO: 54 - RNA, 23 nt, Homo sapiens
  misc_feature 1..23: note = Description of sequence: Description: ZPI mRNA target sequences: starting position on NM_016186.3: 1356
  source 1..23: mol_type = mRNA
tgtcctcaaactgccctaccaag

SEQ ID NO: 55 - RNA, 23 nt, Homo sapiens
  misc_feature 1..23: note = Description of sequence: Description: ZPI mRNA target sequences: starting position on NM_016186.3: 1362
  source 1..23: mol_type = mRNA
caaactgccctaccaaggaaatg

SEQ ID NO: 56 - RNA, 23 nt, Homo sapiens
  misc_feature 1..23: note = Description of sequence: Description: ZPI mRNA target sequences: starting position on NM_016186.3: 1357
  source 1..23: mol_type = mRNA
gtcctcaaactgccctaccaagg

SEQ ID NO: 57 - RNA, 23 nt, Homo sapiens
  misc_feature 1..23: note = Description of sequence: Description: ZPI mRNA target sequences: starting position on NM_016186.3: 1355
  source 1..23: mol_type = mRNA
atgtcctcaaactgccctaccaa

SEQ ID NO: 58 - RNA, 23 nt, Homo sapiens
  misc_feature 1..23: note = Description of sequence: Description: ZPI mRNA target sequences: starting position on NM_016186.3: 1256
  source 1..23: mol_type = mRNA
tcgacactttccacctggacaag

SEQ ID NO: 59 - RNA, 23 nt, Homo sapiens
  misc_feature 1..23: note = Description of sequence: Description: ZPI mRNA target sequences: starting position on NM_016186.3: 1319
  source 1..23: mol_type = mRNA
agtttgcctccacctttgacaag

SEQ ID NO: 60 - RNA, 23 nt, Homo sapiens
  misc_feature 1..23: note = Description of sequence: Description: ZPI mRNA target sequences: starting position on NM_016186.3: 1257
  source 1..23: mol_type = mRNA
cgacactttccacctggacaagt

SEQ ID NO: 61 - RNA, 23 nt, Homo sapiens
  misc_feature 1..23: note = Description of sequence: Description: ZPI mRNA target sequences: starting position on NM_016186.3: 1262
  source 1..23: mol_type = mRNA
ctttccacctggacaagtacaag

SEQ ID NO: 62 - RNA, 23 nt, Homo sapiens
  misc_feature 1..23: note = Description of sequence: Description: ZPI mRNA target sequences: starting position on NM_016186.3: 1260
  source 1..23: mol_type = mRNA
cactttccacctggacaagtaca

SEQ ID NO: 63 - RNA, 23 nt, Homo sapiens
  misc_feature 1..23: note = Description of sequence: Description: ZPI mRNA target sequences: starting position on NM_016186.3: 1358
  source 1..23: mol_type = mRNA
tcctcaaactgccctaccaagga

SEQ ID NO: 64 - RNA, 23 nt, Homo sapiens
  misc_feature 1..23: note = Description of sequence: Description: ZPI mRNA target sequences: starting position on NM_016186.3: 1198
  source 1..23: mol_type = mRNA
gattacatcttgttcaaagggaa

SEQ ID NO: 65 - RNA, 23 nt, Homo sapiens
  misc_feature 1..23: note = Description of sequence: Description: ZPI mRNA target sequences: starting position on NM_016186.3: 1381
  source 1..23: mol_type = mRNA
aatgccaccatgctggtggtcct

SEQ ID NO: 66 - RNA, 23 nt, Homo sapiens
  misc_feature 1..23: note = Description of sequence: Description: ZPI mRNA target sequences: starting position on NM_016186.3: 1038
  source 1..23: mol_type = mRNA
tttatccaagaggtattttgata

SEQ ID NO: 67 - RNA, 23 nt, Homo sapiens
  misc_feature 1..23: note = Description of sequence: Description: ZPI mRNA target sequences: starting position on NM_016186.3: 1378
  source 1..23: mol_type = mRNA
ggaaatgccaccatgctggtggt

SEQ ID NO: 68 - RNA, 23 nt, Homo sapiens
  misc_feature 1..23: note = Description of sequence: Description: ZPI mRNA target sequences: starting position on NM_016186.3: 1197
  source 1..23: mol_type = mRNA
ggattacatcttgttcaaaggga

SEQ ID NO: 69 - RNA, 23 nt, Homo sapiens
  misc_feature 1..23: note = Description of sequence: Description: ZPI mRNA target sequences: starting position on NM_016186.3: 766
  source 1..23: mol_type = mRNA
atctccatgaggcacgatggcaa

SEQ ID NO: 70 - RNA, 23 nt, Homo sapiens
  misc_feature 1..23: note = Description of sequence: Description: ZPI mRNA target sequences: starting position on NM_016186.3: 1721
  source 1..23: mol_type = mRNA
attccatgcctcctgtcatcaaa

SEQ ID NO: 71 - RNA, 23 nt, Homo sapiens
  misc_feature 1..23: note = Description of sequence: Description: ZPI mRNA target sequences: starting position on NM_016186.3: 1719
  source 1..23: mol_type = mRNA
ttattccatgcctcctgtcatca

SEQ ID NO: 72 - RNA, 23 nt, Homo sapiens
  misc_feature 1..23: note = Description of sequence: Description: ZPI mRNA target sequences: starting position on NM_016186.3: 1373
  source 1..23: mol_type = mRNA
accaaggaaatgccaccatgctg

SEQ ID NO: 73 - RNA, 23 nt, Homo sapiens
  misc_feature 1..23: note = Description of sequence: Description: ZPI mRNA target sequences: starting position on NM_016186.3: 1392
  source 1..23: mol_type = mRNA
gctggtggtcctcatggagaaaa

SEQ ID NO: 74 - RNA, 23 nt, Homo sapiens
  misc_feature 1..23: note = Description of sequence: Description: ZPI mRNA target sequences: starting position on NM_016186.3: 1202
  source 1..23: mol_type = mRNA
acatcttgttcaaagggaaatgg

SEQ ID NO: 75 - RNA, 23 nt, Homo sapiens
  misc_feature 1..23: note = Description of sequence: Description: ZPI mRNA target sequences: starting position on NM_016186.3: 1374
  source 1..23: mol_type = mRNA
ccaaggaaatgccaccatgctgg

SEQ ID NO: 76 - RNA, 23 nt, Homo sapiens
  misc_feature 1..23: note = Description of sequence: Description: ZPI mRNA target sequences: starting position on NM_016186.3: 1322
  source 1..23: mol_type = mRNA
ttgcctccacctttgacaagaat

SEQ ID NO: 77 - RNA, 23 nt, Homo sapiens
  misc_feature 1..23: note = Description of sequence: Description: ZPI mRNA target sequences: starting position on NM_016186.3: 985
  source 1..23: mol_type = mRNA
gggagttttgccttcatccacaa

SEQ ID NO: 78 - RNA, 23 nt, Homo sapiens
  misc_feature 1..23: note = Description of sequence: Description: ZPI mRNA target sequences: starting position on NM_016186.3: 754
  source 1..23: mol_type = mRNA
ctgctgcgaaagatctccatgag

SEQ ID NO: 79 - RNA, 23 nt, Homo sapiens
  misc_feature 1..23: note = Description of sequence: Description: ZPI mRNA target sequences: starting position on NM_016186.3: 1317
  source 1..23: mol_type = mRNA
caagtttgcctccacctttgaca

SEQ ID NO: 80 - RNA, 23 nt, Homo sapiens
  misc_feature 1..23: note = Description of sequence: Description: ZPI mRNA target sequences: starting position on NM_016186.3: 1318
  source 1..23: mol_type = mRNA
aagtttgcctccacctttgacaa

SEQ ID NO: 81 - RNA, 23 nt, Homo sapiens
  misc_feature 1..23: note = Description of sequence: Description: ZPI mRNA target sequences: starting position on NM_016186.3: 1201
  source 1..23: mol_type = mRNA
tacatcttgttcaaagggaaatg

SEQ ID NO: 82 - RNA, 23 nt, Homo sapiens
  misc_feature 1..23: note = Description of sequence: Description: ZPI mRNA target sequences: starting position on NM_016186.3: 984
  source 1..23: mol_type = mRNA
ggggagttttgccttcatccaca

SEQ ID NO: 83 - RNA, 23 nt, Homo sapiens
  misc_feature 1..23: note = Description of sequence: Description: ZPI mRNA target sequences: starting position on NM_016186.3: 755
  source 1..23: mol_type = mRNA
tgctgcgaaagatctccatgagg

SEQ ID NO: 84 - RNA, 23 nt, Homo sapiens
  misc_feature 1..23: note = Description of sequence: Description: ZPI mRNA target sequences: starting position on NM_016186.3: 1722
  source 1..23: mol_type = mRNA
ttccatgcctcctgtcatcaaag

SEQ ID NO: 85 - RNA, 23 nt, Homo sapiens
  misc_feature 1..23: note = Description of sequence: Description: ZPI mRNA target sequences: starting position on NM_016186.3: 1794
  source 1..23: mol_type = mRNA
tctgtttctgggcagggtggtga

SEQ ID NO: 86 - RNA, 23 nt, Homo sapiens
  misc_feature 1..23: note = Description of sequence: Description: ZPI mRNA target sequences: starting position on NM_016186.3: 750
  source 1..23: mol_type = mRNA
cagcctgctgcgaaagatctcca

SEQ ID NO: 87 - RNA, 23 nt, Homo sapiens
  misc_feature 1..23: note = Description of sequence: Description: ZPI mRNA target sequences: starting position on NM_016186.3: 1152
  source 1..23: mol_type = mRNA
caaactgtttgatgagattaatc

SEQ ID NO: 88 - RNA, 23 nt, Homo sapiens
  misc_feature 1..23: note = Description of sequence: Description: ZPI mRNA target sequences: starting position on NM_016186.3: 1724
  source 1..23: mol_type = mRNA
ccatgcctcctgtcatcaaagtg

SEQ ID NO: 89 - RNA, 23 nt, Homo sapiens
  misc_feature 1..23: note = Description of sequence: Description: ZPI mRNA target sequences: starting position on NM_016186.3: 1530
  source 1..23: mol_type = mRNA
gaagtatgagatgcatgagctgc

SEQ ID NO: 90 - RNA, 23 nt, Homo sapiens
  misc_feature 1..23: note = Description of sequence: Description: ZPI mRNA target sequences: starting position on NM_016186.3: 1529
  source 1..23: mol_type = mRNA
agaagtatgagatgcatgagctg

SEQ ID NO: 91 - RNA, 23 nt, Homo sapiens
  misc_feature 1..23: note = Description of sequence: Description: ZPI mRNA target sequences: starting position on NM_016186.3: 1354
  source 1..23: mol_type = mRNA
catgtcctcaaactgccctacca

SEQ ID NO: 92 - RNA, 23 nt, Homo sapiens
  misc_feature 1..23: note = Description of sequence: Description: ZPI mRNA target sequences: starting position on NM_016186.3: 1153
  source 1..23: mol_type = mRNA
aaactgtttgatgagattaatcc

SEQ ID NO: 93 - RNA, 23 nt, Homo sapiens
  misc_feature 1..23: note = Description of sequence: Description: ZPI mRNA target sequences: starting position on NM_016186.3: 1282
  source 1..23: mol_type = mRNA
aagaccattaaggtgcccatgat

SEQ ID NO: 94 - RNA, 23 nt, Homo sapiens
  misc_feature 1..23: note = Description of sequence: Description: ZPI mRNA target sequences: starting position on NM_016186.3: 1283
  source 1..23: mol_type = mRNA
agaccattaaggtgcccatgatg

SEQ ID NO: 95 - RNA, 23 nt, Homo sapiens
  misc_feature 1..23: note = Description of sequence: Description: ZPI mRNA target sequences: starting position on NM_016186.3: 1795
  source 1..23: mol_type = mRNA
ctgtttctgggcagggtggtgaa

SEQ ID NO: 96 - RNA, 23 nt, Homo sapiens
  misc_feature 1..23: note = Description of sequence: Description: ZPI mRNA target sequences: starting position on NM_016186.3: 1791
  source 1..23: mol_type = mRNA
gcttctgtttctgggcagggtgg

SEQ ID NO: 97 - RNA, 23 nt, Homo sapiens
  misc_feature 1..23: note = Description of sequence: Description: ZPI mRNA target sequences: starting position on NM_016186.3: 1500
  source 1..23: mol_type = mRNA
agttttctttccgaagttcaagc

SEQ ID NO: 98 - RNA, 23 nt, Homo sapiens
  misc_feature 1..23: note = Description of sequence: Description: ZPI mRNA target sequences: starting position on NM_016186.3: 1501
  source 1..23: mol_type = mRNA
gttttctttccgaagttcaagct

SEQ ID NO: 99 - RNA, 23 nt, Homo sapiens
  misc_feature 1..23: note = Description of sequence: Description: ZPI mRNA target sequences: starting position on NM_016186.3: 1792
  source 1..23: mol_type = mRNA
cttctgtttctgggcagggtggt

SEQ ID NO: 100 - RNA, 23 nt, Homo sapiens
  misc_feature 1..23: note = Description of sequence: Description: ZPI mRNA target sequences: starting position on NM_016186.3: 1353
  source 1..23: mol_type = mRNA
tcatgtcctcaaactgccctacc

SEQ ID NO: 101 - RNA, 23 nt, Homo sapiens
  misc_feature 1..23: note = Description of sequence: Description: ZPI mRNA target sequences: starting position on NM_016186.3: 1254
  source 1..23: mol_type = mRNA
agtcgacactttccacctggaca

SEQ ID NO: 102 - RNA, 19 nt, Homo sapiens
  misc_feature 1..19: note = Description of sequence: Description: ZPI mRNA target sequences: starting position on NM_016186.3: 995
  source 1..19: mol_type = mRNA
ccttcatccacaaggattt

SEQ ID NO: 103 - RNA, 19 nt, Homo sapiens
  misc_feature 1..19: note = Description of sequence: Description: ZPI mRNA target sequences: starting position on NM_016186.3: 760
  source 1..19: mol_type = mRNA
cgaaagatctccatgaggc

SEQ ID NO: 104 - RNA, 19 nt, Homo sapiens
  misc_feature 1..19: note = Description of sequence: Description: ZPI mRNA target sequences: starting position on NM_016186.3: 1394
  source 1..19: mol_type = mRNA
tggtggtcctcatggagaa

SEQ ID NO: 105 - RNA, 19 nt, Homo sapiens
  misc_feature 1..19: note = Description of sequence: Description: ZPI mRNA target sequences: starting position on NM_016186.3: 761
  source 1..19: mol_type = mRNA
gaaagatctccatgaggca

SEQ ID NO: 106 - RNA, 19 nt, Homo sapiens
  misc_feature 1..19: note = Description of sequence: Description: ZPI mRNA target sequences: starting position on NM_016186.3: 1535
  source 1..19: mol_type = mRNA
atgagatgcatgagctgct

SEQ ID NO: 107 - RNA, 19 nt, Homo sapiens
  misc_feature 1..19: note = Description of sequence: Description: ZPI mRNA target sequences: starting position on NM_016186.3: 1160
  source 1..19: mol_type = mRNA
ttgatgagattaatcctga

SEQ ID NO: 108 - RNA, 19 nt, Homo sapiens
  misc_feature 1..19: note = Description of sequence: Description: ZPI mRNA target sequences: starting position on NM_016186.3: 1166
  source 1..19: mol_type = mRNA
agattaatcctgaaaccaa

SEQ ID NO: 109 - RNA, 19 nt, Homo sapiens
  misc_feature 1..19: note = Description of sequence: Description: ZPI mRNA target sequences: starting position on NM_016186.3: 1163
  source 1..19: mol_type = mRNA
atgagattaatcctgaaac

SEQ ID NO: 110 - RNA, 19 nt, Homo sapiens
  misc_feature 1..19: note = Description of sequence: Description: ZPI mRNA target sequences: starting position on NM_016186.3: 1165
  source 1..19: mol_type = mRNA
gagattaatcctgaaacca

SEQ ID NO: 111 - RNA, 19 nt, Homo sapiens
  misc_feature 1..19: note = Description of sequence: Description: ZPI mRNA target sequences: starting position on NM_016186.3: 1164
  source 1..19: mol_type = mRNA
tgagattaatcctgaaacc

SEQ ID NO: 112 - RNA, 19 nt, Homo sapiens
  misc_feature 1..19: note = Description of sequence: Description: ZPI mRNA target sequences: starting position on NM_016186.3: 1158
  source 1..19: mol_type = mRNA
gtttgatgagattaatcct

SEQ ID NO: 113 - RNA, 19 nt, Homo sapiens
  misc_feature 1..19: note = Description of sequence: Description: ZPI mRNA target sequences: starting position on NM_016186.3: 992
  source 1..19: mol_type = mRNA
ttgccttcatccacaagga

SEQ ID NO: 114 - RNA, 19 nt, Homo sapiens
  misc_feature 1..19: note = Description of sequence: Description: ZPI mRNA target sequences: starting position on NM_016186.3: 762
  source 1..19: mol_type = mRNA
aaagatctccatgaggcac

SEQ ID NO: 115 - RNA, 19 nt, Homo sapiens
  misc_feature 1..19: note = Description of sequence: Description: ZPI mRNA target sequences: starting position on NM_016186.3: 1393
  source 1..19: mol_type = mRNA
ctggtggtcctcatggaga

SEQ ID NO: 116 - RNA, 19 nt, Homo sapiens
  misc_feature 1..19: note = Description of sequence: Description: ZPI mRNA target sequences: starting position on NM_016186.3: 997
  source 1..19: mol_type = mRNA
ttcatccacaaggattttg

SEQ ID NO: 117 - RNA, 19 nt, Homo sapiens
  misc_feature 1..19: note = Description of sequence: Description: ZPI mRNA target sequences: starting position on NM_016186.3: 763
  source 1..19: mol_type = mRNA
aagatctccatgaggcacg

SEQ ID NO: 118 - RNA, 19 nt, Homo sapiens
  misc_feature 1..19: note = Description of sequence: Description: ZPI mRNA target sequences: starting position on NM_016186.3: 999
  source 1..19: mol_type = mRNA
catccacaaggattttgat

SEQ ID NO: 119 - RNA, 19 nt, Homo sapiens
  misc_feature 1..19: note = Description of sequence: Description: ZPI mRNA target sequences: starting position on NM_016186.3: 1161
  source 1..19: mol_type = mRNA
tgatgagattaatcctgaa

SEQ ID NO: 120 - RNA, 19 nt, Homo sapiens
  misc_feature 1..19: note = Description of sequence: Description: ZPI mRNA target sequences: starting position on NM_016186.3: 994
  source 1..19: mol_type = mRNA
gccttcatccacaaggatt

SEQ ID NO: 121 - RNA, 19 nt, Homo sapiens
  misc_feature 1..19: note = Description of sequence: Description: ZPI mRNA target sequences: starting position on NM_016186.3: 767
  source 1..19: mol_type = mRNA
tctccatgaggcacgatgg

SEQ ID NO: 122 - RNA, 23 nt, synthetic construct
  misc_feature 1..23: note = Description of sequence: Description: ZPI siRNA antisense strand (unmodified); corresponding positions on NM_016186.3: 991-1012
  source 1..23: mol_type = other RNA
aaatccttgtggatgaaggcaaa

SEQ ID NO: 123 - RNA, 23 nt, synthetic construct
  misc_feature 1..23: note = Description of sequence: Description: ZPI siRNA antisense strand (unmodified); corresponding positions on NM_016186.3: 756-777
  source 1..23: mol_type = other RNA
gcctcatggagatctttcgcagc

SEQ ID NO: 124 - RNA, 23 nt, synthetic construct
  misc_feature 1..23: note = Description of sequence: Description: ZPI siRNA antisense strand (unmodified); corresponding positions on NM_016186.3: 1390-1411
  source 1..23: mol_type = other RNA
ttctccatgaggaccaccagcat

SEQ ID NO: 125 - RNA, 23 nt, synthetic construct
  misc_feature 1..23: note = Description of sequence: Description: ZPI siRNA antisense strand (unmodified); corresponding positions on NM_016186.3: 757-778
  source 1..23: mol_type = other RNA
tgcctcatggagatctttcgcag

SEQ ID NO: 126 - RNA, 23 nt, synthetic construct
  misc_feature 1..23: note = Description of sequence: Description: ZPI siRNA antisense strand (unmodified); corresponding positions on NM_016186.3: 1531-1552
  source 1..23: mol_type = other RNA
agcagctcatgcatctcatactt

SEQ ID NO: 127 - RNA, 23 nt, synthetic construct
  misc_feature 1..23: note = Description of sequence: Description: ZPI siRNA antisense strand (unmodified); corresponding positions on NM_016186.3: 1156-1177
  source 1..23: mol_type = other RNA
tcaggattaatctcatcaaacag

SEQ ID NO: 128 - RNA, 23 nt, synthetic construct
  misc_feature 1..23: note = Description of sequence: Description: ZPI siRNA antisense strand (unmodified); corresponding positions on NM_016186.3: 1162-1183
  source 1..23: mol_type = other RNA
ttggtttcaggattaatctcatc

SEQ ID NO: 129 - RNA, 23 nt, synthetic construct
  misc_feature 1..23: note = Description of sequence: Description: ZPI siRNA antisense strand (unmodified); corresponding positions on NM_016186.3: 1159-1180
  source 1..23: mol_type = other RNA
gtttcaggattaatctcatcaaa

SEQ ID NO: 130 - RNA, 23 nt, synthetic construct
  misc_feature 1..23: note = Description of sequence: Description: ZPI siRNA antisense strand (unmodified); corresponding positions on NM_016186.3: 1161-1182
  source 1..23: mol_type = other RNA
tggtttcaggattaatctcatca

SEQ ID NO: 131 - RNA, 23 nt, synthetic construct
  misc_feature 1..23: note = Description of sequence: Description: ZPI siRNA antisense strand (unmodified); corresponding positions on NM_016186.3: 1160-1181
  source 1..23: mol_type = other RNA
ggtttcaggattaatctcatcaa

SEQ ID NO: 132 - RNA, 23 nt, synthetic construct
  misc_feature 1..23: note = Description of sequence: Description: ZPI siRNA antisense strand (unmodified); corresponding positions on NM_016186.3: 1154-1175
  source 1..23: mol_type = other RNA
aggattaatctcatcaaacagtt

SEQ ID NO: 133 - RNA, 23 nt, synthetic construct
  misc_feature 1..23: note = Description of sequence: Description: ZPI siRNA antisense strand (unmodified); corresponding positions on NM_016186.3: 988-1009
  source 1..23: mol_type = other RNA
tccttgtggatgaaggcaaaact

SEQ ID NO: 134 - RNA, 23 nt, synthetic construct
  misc_feature 1..23: note = Description of sequence: Description: ZPI siRNA antisense strand (unmodified); corresponding positions on NM_016186.3: 758-779
  source 1..23: mol_type = other RNA
gtgcctcatggagatctttcgca

SEQ ID NO: 135 - RNA, 23 nt, synthetic construct
  misc_feature 1..23: note = Description of sequence: Description: ZPI siRNA antisense strand (unmodified); corresponding positions on NM_016186.3: 1389-1410
  source 1..23: mol_type = other RNA
tctccatgaggaccaccagcatg

SEQ ID NO: 136 - RNA, 23 nt, synthetic construct
  misc_feature 1..23: note = Description of sequence: Description: ZPI siRNA antisense strand (unmodified); corresponding positions on NM_016186.3: 993-1014
  source 1..23: mol_type = other RNA
caaaatccttgtggatgaaggca

SEQ ID NO: 137 - RNA, 23 nt, synthetic construct
  misc_feature 1..23: note = Description of sequence: Description: ZPI siRNA antisense strand (unmodified); corresponding positions on NM_016186.3: 759-780
  source 1..23: mol_type = other RNA
cgtgcctcatggagatctttcgc

SEQ ID NO: 138 - RNA, 23 nt, synthetic construct
  misc_feature 1..23: note = Description of sequence: Description: ZPI siRNA antisense strand (unmodified); corresponding positions on NM_016186.3: 995-1016
  source 1..23: mol_type = other RNA
atcaaaatccttgtggatgaagg

SEQ ID NO: 139 - RNA, 23 nt, synthetic construct
  misc_feature 1..23: note = Description of sequence: Description: ZPI siRNA antisense strand (unmodified); corresponding positions on NM_016186.3: 1157-1178
  source 1..23: mol_type = other RNA
ttcaggattaatctcatcaaaca

SEQ ID NO: 140 - RNA, 23 nt, synthetic construct
  misc_feature 1..23: note = Description of sequence: Description: ZPI siRNA antisense strand (unmodified); corresponding positions on NM_016186.3: 990-1011
  source 1..23: mol_type = other RNA
aatccttgtggatgaaggcaaaa

SEQ ID NO: 141 - RNA, 23 nt, synthetic construct
  misc_feature 1..23: note = Description of sequence: Description: ZPI siRNA antisense strand (unmodified); corresponding positions on NM_016186.3: 763-784
  source 1..23: mol_type = other RNA
ccatcgtgcctcatggagatctt

SEQ ID NO: 142 - RNA, 23 nt, synthetic construct
  misc_feature 1..23: note = Description of sequence: Description: ZPI siRNA antisense strand (unmodified); corresponding positions on NM_016186.3: 1387-1408
  source 1..23: mol_type = other RNA
tccatgaggaccaccagcatggt

SEQ ID NO: 143 - RNA, 23 nt, synthetic construct
  misc_feature 1..23: note = Description of sequence: Description: ZPI siRNA antisense strand (unmodified); corresponding positions on NM_016186.3: 989-1010
  source 1..23: mol_type = other RNA
atccttgtggatgaaggcaaaac

SEQ ID NO: 144 - RNA, 23 nt, synthetic construct
  misc_feature 1..23: note = Description of sequence: Description: ZPI siRNA antisense strand (unmodified); corresponding positions on NM_016186.3: 992-1013
  source 1..23: mol_type = other RNA
aaaatccttgtggatgaaggcaa

SEQ ID NO: 145 - RNA, 23 nt, synthetic construct
  misc_feature 1..23: note = Description of sequence: Description: ZPI siRNA antisense strand (unmodified); corresponding positions on NM_016186.3: 1370-1391
  source 1..23: mol_type = other RNA
catggtggcatttccttggtagg

SEQ ID NO: 146 - RNA, 23 nt, synthetic construct
  misc_feature 1..23: note = Description of sequence: Description: ZPI siRNA antisense strand (unmodified); corresponding positions on NM_016186.3: 1158-1179
  source 1..23: mol_type = other RNA
tttcaggattaatctcatcaaac

SEQ ID NO: 147 - RNA, 23 nt, synthetic construct
  misc_feature 1..23: note = Description of sequence: Description: ZPI siRNA antisense strand (unmodified); corresponding positions on NM_016186.3: 994-1015
  source 1..23: mol_type = other RNA
tcaaaatccttgtggatgaaggc

SEQ ID NO: 148 - RNA, 23 nt, synthetic construct
  misc_feature 1..23: note = Description of sequence: Description: ZPI siRNA antisense strand (unmodified); corresponding positions on NM_016186.3: 760-781
  source 1..23: mol_type = other RNA
tcgtgcctcatggagatctttcg

SEQ ID NO: 149 - RNA, 23 nt, synthetic construct
  misc_feature 1..23: note = Description of sequence: Description: ZPI siRNA antisense strand (unmodified); corresponding positions on NM_016186.3: 1155-1176
  source 1..23: mol_type = other RNA
caggattaatctcatcaaacagt

SEQ ID NO: 150 - RNA, 23 nt, synthetic construct
  misc_feature 1..23: note = Description of sequence: Description: ZPI siRNA antisense strand (unmodified); corresponding positions on NM_016186.3: 1388-1409
  source 1..23: mol_type = other RNA
ctccatgaggaccaccagcatgg

SEQ ID NO: 151 - RNA, 23 nt, synthetic construct
  misc_feature 1..23: note = Description of sequence: Description: ZPI siRNA antisense strand (unmodified); corresponding positions on NM_016186.3: 987-1008
  source 1..23: mol_type = other RNA
ccttgtggatgaaggcaaaactc

SEQ ID NO: 152 - RNA, 23 nt, synthetic construct
  misc_feature 1..23: note = Description of sequence: Description: ZPI siRNA antisense strand (unmodified); corresponding positions on NM_016186.3: 1383-1404
  source 1..23: mol_type = other RNA
tgaggaccaccagcatggtggca

SEQ ID NO: 153 - RNA, 23 nt, synthetic construct
  misc_feature 1..23: note = Description of sequence: Description: ZPI siRNA antisense strand (unmodified); corresponding positions on NM_016186.3: 1384-1405
  source 1..23: mol_type = other RNA
atgaggaccaccagcatggtggc

SEQ ID NO: 154 - RNA, 23 nt, synthetic construct
  misc_feature 1..23: note = Description of sequence: Description: ZPI siRNA antisense strand (unmodified); corresponding positions on NM_016186.3: 761-782
  source 1..23: mol_type = other RNA
atcgtgcctcatggagatctttc

SEQ ID NO: 155 - RNA, 23 nt, synthetic construct
  misc_feature 1..23: note = Description of sequence: Description: ZPI siRNA antisense strand (unmodified); corresponding positions on NM_016186.3: 986-1007
  source 1..23: mol_type = other RNA
cttgtggatgaaggcaaaactcc

SEQ ID NO: 156 - RNA, 23 nt, synthetic construct
  misc_feature 1..23: note = Description of sequence: Description: ZPI siRNA antisense strand (unmodified); corresponding positions on NM_016186.3: 1385-1406
  source 1..23: mol_type = other RNA
catgaggaccaccagcatggtgg

SEQ ID NO: 157 - RNA, 23 nt, synthetic construct
  misc_feature 1..23: note = Description of sequence: Description: ZPI siRNA antisense strand (unmodified); corresponding positions on NM_016186.3: 762-783
  source 1..23: mol_type = other RNA
catcgtgcctcatggagatcttt

SEQ ID NO: 158 - RNA, 23 nt, synthetic construct
  misc_feature 1..23: note = Description of sequence: Description: ZPI siRNA antisense strand (unmodified); corresponding positions on NM_016186.3: 1386-1407
  source 1..23: mol_type = other RNA
ccatgaggaccaccagcatggtg

SEQ ID NO: 159 - RNA, 23 nt, synthetic construct
  misc_feature 1..23: note = Description of sequence: Description: ZPI siRNA antisense strand (unmodified); corresponding positions on NM_016186.3: 1321-1342
  source 1..23: mol_type = other RNA
ttcttgtcaaaggtggaggcaaa

SEQ ID NO: 160 - RNA, 23 nt, synthetic construct
  misc_feature 1..23: note = Description of sequence: Description: ZPI siRNA antisense strand (unmodified); corresponding positions on NM_016186.3: 1323-1344
  source 1..23: mol_type = other RNA
aattcttgtcaaaggtggaggca

SEQ ID NO: 161 - RNA, 23 nt, synthetic construct
  misc_feature 1..23: note = Description of sequence: Description: ZPI siRNA antisense strand (unmodified); corresponding positions on NM_016186.3: 1285-1306
  source 1..23: mol_type = other RNA
tacatcatgggcaccttaatggt

SEQ ID NO: 162 - RNA, 23 nt, synthetic construct
  misc_feature 1..23: note = Description of sequence: Description: ZPI siRNA antisense strand (unmodified); corresponding positions on NM_016186.3: 1364-1385
  source 1..23: mol_type = other RNA
ggcatttccttggtagggcagtt

SEQ ID NO: 163 - RNA, 23 nt, synthetic construct
  misc_feature 1..23: note = Description of sequence: Description: ZPI siRNA antisense strand (unmodified); corresponding positions on NM_016186.3: 1360-1381
  source 1..23: mol_type = other RNA
tttccttggtagggcagtttgag

SEQ ID NO: 164 - RNA, 23 nt, synthetic construct
  misc_feature 1..23: note = Description of sequence: Description: ZPI siRNA antisense strand (unmodified); corresponding positions on NM_016186.3: 1359-1380
  source 1..23: mol_type = other RNA
ttccttggtagggcagtttgagg

SEQ ID NO: 165 - RNA, 23 nt, synthetic construct
  misc_feature 1..23: note = Description of sequence: Description: ZPI siRNA antisense strand (unmodified); corresponding positions on NM_016186.3: 1324-1345
  source 1..23: mol_type = other RNA
aaattcttgtcaaaggtggaggc

SEQ ID NO: 166 - RNA, 23 nt, synthetic construct
  misc_feature 1..23: note = Description of sequence: Description: ZPI siRNA antisense strand (unmodified); corresponding positions on NM_016186.3: 1255-1276
  source 1..23: mol_type = other RNA
ttgtccaggtggaaagtgtcgac

SEQ ID NO: 167 - RNA, 23 nt, synthetic construct
  misc_feature 1..23: note = Description of sequence: Description: ZPI siRNA antisense strand (unmodified); corresponding positions on NM_016186.3: 1259-1280
  source 1..23: mol_type = other RNA
gtacttgtccaggtggaaagtgt

SEQ ID NO: 168 - RNA, 23 nt, synthetic construct
  misc_feature 1..23: note = Description of sequence: Description: ZPI siRNA antisense strand (unmodified); corresponding positions on NM_016186.3: 1361-1382
  source 1..23: mol_type = other RNA
atttccttggtagggcagtttga

SEQ ID NO: 169 - RNA, 23 nt, synthetic construct
  misc_feature 1..23: note = Description of sequence: Description: ZPI siRNA antisense strand (unmodified); corresponding positions on NM_016186.3: 1363-1384
  source 1..23: mol_type = other RNA
gcatttccttggtagggcagttt

SEQ ID NO: 170 - RNA, 23 nt, synthetic construct
  misc_feature 1..23: note = Description of sequence: Description: ZPI siRNA antisense strand (unmodified); corresponding positions on NM_016186.3: 1258-1279
  source 1..23: mol_type = other RNA
tacttgtccaggtggaaagtgtc

SEQ ID NO: 171 - RNA, 23 nt, synthetic construct
  misc_feature 1..23: note = Description of sequence: Description: ZPI siRNA antisense strand (unmodified); corresponding positions on NM_016186.3: 1284-1305
  source 1..23: mol_type = other RNA
acatcatgggcaccttaatggtc

SEQ ID NO: 172 - RNA, 23 nt, synthetic construct
  misc_feature 1..23: note = Description of sequence: Description: ZPI siRNA antisense strand (unmodified); corresponding positions on NM_016186.3: 1320-1341
  source 1..23: mol_type = other RNA
tcttgtcaaaggtggaggcaaac

SEQ ID NO: 173 - RNA, 23 nt, synthetic construct
  misc_feature 1..23: note = Description of sequence: Description: ZPI siRNA antisense strand (unmodified); corresponding positions on NM_016186.3: 1261-1282
  source 1..23: mol_type = other RNA
ttgtacttgtccaggtggaaagt

SEQ ID NO: 174 - RNA, 23 nt, synthetic construct
  misc_feature 1..23: note = Description of sequence: Description: ZPI siRNA antisense strand (unmodified); corresponding positions on NM_016186.3: 1356-1377
  source 1..23: mol_type = other RNA
cttggtagggcagtttgaggaca

SEQ ID NO: 175 - RNA, 23 nt, synthetic construct
  misc_feature 1..23: note = Description of sequence: Description: ZPI siRNA antisense strand (unmodified); corresponding positions on NM_016186.3: 1362-1383
  source 1..23: mol_type = other RNA
catttccttggtagggcagtttg

SEQ ID NO: 176 - RNA, 23 nt, synthetic construct
  misc_feature 1..23: note = Description of sequence: Description: ZPI siRNA antisense strand (unmodified); corresponding positions on NM_016186.3: 1357-1378
  source 1..23: mol_type = other RNA
ccttggtagggcagtttgaggac

SEQ ID NO: 177 - RNA, 23 nt, synthetic construct
  misc_feature 1..23: note = Description of sequence: Description: ZPI siRNA antisense strand (unmodified); corresponding positions on NM_016186.3: 1355-1376
  source 1..23: mol_type = other RNA
ttggtagggcagtttgaggacat

SEQ ID NO: 178 - RNA, 23 nt, synthetic construct
  misc_feature 1..23: note = Description of sequence: Description: ZPI siRNA antisense strand (unmodified); corresponding positions on NM_016186.3: 1256-1277
  source 1..23: mol_type = other RNA
cttgtccaggtggaaagtgtcga

SEQ ID NO: 179 - RNA, 23 nt, synthetic construct
  misc_feature 1..23: note = Description of sequence: Description: ZPI siRNA antisense strand (unmodified); corresponding positions on NM_016186.3: 1319-1340
  source 1..23: mol_type = other RNA
cttgtcaaaggtggaggcaaact

SEQ ID NO: 180 - RNA, 23 nt, synthetic construct
  misc_feature 1..23: note = Description of sequence: Description: ZPI siRNA antisense strand (unmodified); corresponding positions on NM_016186.3: 1257-1278
  source 1..23: mol_type = other RNA
acttgtccaggtggaaagtgtcg

SEQ ID NO: 181 - RNA, 23 nt, synthetic construct
  misc_feature 1..23: note = Description of sequence: Description: ZPI siRNA antisense strand (unmodified); corresponding positions on NM_016186.3: 1262-1283
  source 1..23: mol_type = other RNA
cttgtacttgtccaggtggaaag

SEQ ID NO: 182 - RNA, 23 nt, synthetic construct
  misc_feature 1..23: note = Description of sequence: Description: ZPI siRNA antisense strand (unmodified); corresponding positions on NM_016186.3: 1260-1281
  source 1..23: mol_type = other RNA
tgtacttgtccaggtggaaagtg

SEQ ID NO: 183 - RNA, 23 nt, synthetic construct
  misc_feature 1..23: note = Description of sequence: Description: ZPI siRNA antisense strand (unmodified); corresponding positions on NM_016186.3: 1358-1379
  source 1..23: mol_type = other RNA
tccttggtagggcagtttgagga

SEQ ID NO: 184 - RNA, 23 nt, synthetic construct
  misc_feature 1..23: note = Description of sequence: Description: ZPI siRNA antisense strand (unmodified); corresponding positions on NM_016186.3: 1198-1219
  source 1..23: mol_type = other RNA
ttccctttgaacaagatgtaatc

SEQ ID NO: 185 - RNA, 23 nt, synthetic construct
  misc_feature 1..23: note = Description of sequence: Description: ZPI siRNA antisense strand (unmodified); corresponding positions on NM_016186.3: 1381-1402
  source 1..23: mol_type = other RNA
aggaccaccagcatggtggcatt

SEQ ID NO: 186 - RNA, 23 nt, synthetic construct
  misc_feature 1..23: note = Description of sequence: Description: ZPI siRNA antisense strand (unmodified); corresponding positions on NM_016186.3: 1038-1059
  source 1..23: mol_type = other RNA
tatcaaaatacctcttggataaa

SEQ ID NO: 187 - RNA, 23 nt, synthetic construct
  misc_feature 1..23: note = Description of sequence: Description: ZPI siRNA antisense strand (unmodified); corresponding positions on NM_016186.3: 1378-1399
  source 1..23: mol_type = other RNA
accaccagcatggtggcatttcc

SEQ ID NO: 188 - RNA, 23 nt, synthetic construct
  misc_feature 1..23: note = Description of sequence: Description: ZPI siRNA antisense strand (unmodified); corresponding positions on NM_016186.3: 1197-1218
  source 1..23: mol_type = other RNA
tccctttgaacaagatgtaatcc

SEQ ID NO: 189 - RNA, 23 nt, synthetic construct
  misc_feature 1..23: note = Description of sequence: Description: ZPI siRNA antisense strand (unmodified); corresponding positions on NM_016186.3: 766-787
  source 1..23: mol_type = other RNA
ttgccatcgtgcctcatggagat

SEQ ID NO: 190 - RNA, 23 nt, synthetic construct
  misc_feature 1..23: note = Description of sequence: Description: ZPI siRNA antisense strand (unmodified); corresponding positions on NM_016186.3: 1721-1742
  source 1..23: mol_type = other RNA
tttgatgacaggaggcatggaat

SEQ ID NO: 191 - RNA, 23 nt, synthetic construct
  misc_feature 1..23: note = Description of sequence: Description: ZPI siRNA antisense strand (unmodified); corresponding positions on NM_016186.3: 1719-1740
  source 1..23: mol_type = other RNA
tgatgacaggaggcatggaataa

SEQ ID NO: 192 - RNA, 23 nt, synthetic construct
  misc_feature 1..23: note = Description of sequence: Description: ZPI siRNA antisense strand (unmodified); corresponding positions on NM_016186.3: 1373-1394
  source 1..23: mol_type = other RNA
cagcatggtggcatttccttggt

SEQ ID NO: 193 - RNA, 23 nt, synthetic construct
  misc_feature 1..23: note = Description of sequence: Description: ZPI siRNA antisense strand (unmodified); corresponding positions on NM_016186.3: 1392-1413
  source 1..23: mol_type = other RNA
ttttctccatgaggaccaccagc

SEQ ID NO: 194 - RNA, 23 nt, synthetic construct
  misc_feature 1..23: note = Description of sequence: Description: ZPI siRNA antisense strand (unmodified); corresponding positions on NM_016186.3: 1202-1223
  source 1..23: mol_type = other RNA
ccatttccctttgaacaagatgt

SEQ ID NO: 195 - RNA, 23 nt, synthetic construct
  misc_feature 1..23: note = Description of sequence: Description: ZPI siRNA antisense strand (unmodified); corresponding positions on NM_016186.3: 1374-1395
  source 1..23: mol_type = other RNA
ccagcatggtggcatttccttgg

SEQ ID NO: 196 - RNA, 23 nt, synthetic construct
  misc_feature 1..23: note = Description of sequence: Description: ZPI siRNA antisense strand (unmodified); corresponding positions on NM_016186.3: 1322-1343
  source 1..23: mol_type = other RNA
attcttgtcaaaggtggaggcaa

SEQ ID NO: 197 - RNA, 23 nt, synthetic construct
  misc_feature 1..23: note = Description of sequence: Description: ZPI siRNA antisense strand (unmodified); corresponding positions on NM_016186.3: 985-1006
  source 1..23: mol_type = other RNA
ttgtggatgaaggcaaaactccc

SEQ ID NO: 198 - RNA, 23 nt, synthetic construct
  misc_feature 1..23: note = Description of sequence: Description: ZPI siRNA antisense strand (unmodified); corresponding positions on NM_016186.3: 754-775
  source 1..23: mol_type = other RNA
ctcatggagatctttcgcagcag

SEQ ID NO: 199 - RNA, 23 nt, synthetic construct
  misc_feature 1..23: note = Description of sequence: Description: ZPI siRNA antisense strand (unmodified); corresponding positions on NM_016186.3: 1317-1338
  source 1..23: mol_type = other RNA
tgtcaaaggtggaggcaaacttg

SEQ ID NO: 200 - RNA, 23 nt, synthetic construct
  misc_feature 1..23: note = Description of sequence: Description: ZPI siRNA antisense strand (unmodified); corresponding positions on NM_016186.3: 1318-1339
  source 1..23: mol_type = other RNA
ttgtcaaaggtggaggcaaactt

SEQ ID NO: 201 - RNA, 23 nt, synthetic construct
  misc_feature 1..23: note = Description of sequence: Description: ZPI siRNA antisense strand (unmodified); corresponding positions on NM_016186.3: 1201-1222
  source 1..23: mol_type = other RNA
catttccctttgaacaagatgta

SEQ ID NO: 202 - RNA, 23 nt, synthetic construct
  misc_feature 1..23: note = Description of sequence: Description: ZPI siRNA antisense strand (unmodified); corresponding positions on NM_016186.3: 984-1005
  source 1..23: mol_type = other RNA
tgtggatgaaggcaaaactcccc

SEQ ID NO: 203 - RNA, 23 nt, synthetic construct
  misc_feature 1..23: note = Description of sequence: Description: ZPI siRNA antisense strand (unmodified); corresponding positions on NM_016186.3: 755-776
  source 1..23: mol_type = other RNA
cctcatggagatctttcgcagca

SEQ ID NO: 204 - RNA, 23 nt, synthetic construct
  misc_feature 1..23: note = Description of sequence: Description: ZPI siRNA antisense strand (unmodified); corresponding positions on NM_016186.3: 1722-1743
  source 1..23: mol_type = other RNA
ctttgatgacaggaggcatggaa

SEQ ID NO: 205 - RNA, 23 nt, synthetic construct
  misc_feature 1..23: note = Description of sequence: Description: ZPI siRNA antisense strand (unmodified); corresponding positions on NM_016186.3: 1794-1815
  source 1..23: mol_type = other RNA
tcaccaccctgcccagaaacaga

SEQ ID NO: 206 - RNA, 23 nt, synthetic construct
  misc_feature 1..23: note = Description of sequence: Description: ZPI siRNA antisense strand (unmodified); corresponding positions on NM_016186.3: 750-771
  source 1..23: mol_type = other RNA
tggagatctttcgcagcaggctg

SEQ ID NO: 207 - RNA, 23 nt, synthetic construct
  misc_feature 1..23: note = Description of sequence: Description: ZPI siRNA antisense strand (unmodified); corresponding positions on NM_016186.3: 1152-1173
  source 1..23: mol_type = other RNA
gattaatctcatcaaacagtttg

SEQ ID NO: 208 - RNA, 23 nt, synthetic construct
  misc_feature 1..23: note = Description of sequence: Description: ZPI siRNA antisense strand (unmodified); corresponding positions on NM_016186.3: 1724-1745
  source 1..23: mol_type = other RNA
cactttgatgacaggaggcatgg

SEQ ID NO: 209 - RNA, 23 nt, synthetic construct
  misc_feature 1..23: note = Description of sequence: Description: ZPI siRNA antisense strand (unmodified); corresponding positions on NM_016186.3: 1530-1551
  source 1..23: mol_type = other RNA
gcagctcatgcatctcatacttc

SEQ ID NO: 210 - RNA, 23 nt, synthetic construct
  misc_feature 1..23: note = Description of sequence: Description: ZPI siRNA antisense strand (unmodified); corresponding positions on NM_016186.3: 1529-1550
  source 1..23: mol_type = other RNA
cagctcatgcatctcatacttct

SEQ ID NO: 211 - RNA, 23 nt, synthetic construct
  misc_feature 1..23: note = Description of sequence: Description: ZPI siRNA antisense strand (unmodified); corresponding positions on NM_016186.3: 1354-1375
  source 1..23: mol_type = other RNA
tggtagggcagtttgaggacatg

SEQ ID NO: 212 - RNA, 23 nt, synthetic construct
  misc_feature 1..23: note = Description of sequence: Description: ZPI siRNA antisense strand (unmodified); corresponding positions on NM_016186.3: 1153-1174
  source 1..23: mol_type = other RNA
ggattaatctcatcaaacagttt

SEQ ID NO: 213 - RNA, 23 nt, synthetic construct
  misc_feature 1..23: note = Description of sequence: Description: ZPI siRNA antisense strand (unmodified); corresponding positions on NM_016186.3: 1282-1303
  source 1..23: mol_type = other RNA
atcatgggcaccttaatggtctt

SEQ ID NO: 214 - RNA, 23 nt, synthetic construct
  misc_feature 1..23: note = Description of sequence: Description: ZPI siRNA antisense strand (unmodified); corresponding positions on NM_016186.3: 1283-1304
  source 1..23: mol_type = other RNA
catcatgggcaccttaatggtct

SEQ ID NO: 215 - RNA, 23 nt, synthetic construct
  misc_feature 1..23: note = Description of sequence: Description: ZPI siRNA antisense strand (unmodified); corresponding positions on NM_016186.3: 1795-1816
  source 1..23: mol_type = other RNA
ttcaccaccctgcccagaaacag

SEQ ID NO: 216 - RNA, 23 nt, synthetic construct
  misc_feature 1..23: note = Description of sequence: Description: ZPI siRNA antisense strand (unmodified); corresponding positions on NM_016186.3: 1791-1812
  source 1..23: mol_type = other RNA
ccaccctgcccagaaacagaagc

SEQ ID NO: 217 - RNA, 23 nt, synthetic construct
  misc_feature 1..23: note = Description of sequence: Description: ZPI siRNA antisense strand (unmodified); corresponding positions on NM_016186.3: 1500-1521
  source 1..23: mol_type = other RNA
gcttgaacttcggaaagaaaact

SEQ ID NO: 218 - RNA, 23 nt, synthetic construct
  misc_feature 1..23: note = Description of sequence: Description: ZPI siRNA antisense strand (unmodified); corresponding positions on NM_016186.3: 1501-1522
  source 1..23: mol_type = other RNA
agcttgaacttcggaaagaaaac

SEQ ID NO: 219 - RNA, 23 nt, synthetic construct
  misc_feature 1..23: note = Description of sequence: Description: ZPI siRNA antisense strand (unmodified); corresponding positions on NM_016186.3: 1792-1813
  source 1..23: mol_type = other RNA
accaccctgcccagaaacagaag

SEQ ID NO: 220 - RNA, 23 nt, synthetic construct
  misc_feature 1..23: note = Description of sequence: Description: ZPI siRNA antisense strand (unmodified); corresponding positions on NM_016186.3: 1353-1374
  source 1..23: mol_type = other RNA
ggtagggcagtttgaggacatga

SEQ ID NO: 221 - RNA, 23 nt, synthetic construct
  misc_feature 1..23: note = Description of sequence: Description: ZPI siRNA antisense strand (unmodified); corresponding positions on NM_016186.3: 1254-1275
  source 1..23: mol_type = other RNA
tgtccaggtggaaagtgtcgact

SEQ ID NO: 222 - RNA, 19 nt, synthetic construct
  misc_feature 1..19: note = Description of sequence: Description: ZPI siRNA antisense strand (unmodified); corresponding positions on NM_016186.3: 995-1014
  source 1..19: mol_type = other RNA
aaatccttgtggatgaagg

SEQ ID NO: 223 - RNA, 19 nt, synthetic construct
  misc_feature 1..19: note = Description of sequence: Description: ZPI siRNA antisense strand (unmodified); corresponding positions on NM_016186.3: 760-779
  source 1..19: mol_type = other RNA
gcctcatggagatctttcg

SEQ ID NO: 224 - RNA, 19 nt, synthetic construct
  misc_feature 1..19: note = Description of sequence: Description: ZPI siRNA antisense strand (unmodified); corresponding positions on NM_016186.3: 1394-1413
  source 1..19: mol_type = other RNA
ttctccatgaggaccacca

SEQ ID NO: 225 - RNA, 19 nt, synthetic construct
  misc_feature 1..19: note = Description of sequence: Description: ZPI siRNA antisense strand (unmodified); corresponding positions on NM_016186.3: 761-780
  source 1..19: mol_type = other RNA
tgcctcatggagatctttc

SEQ ID NO: 226 - RNA, 19 nt, synthetic construct
  misc_feature 1..19: note = Description of sequence: Description: ZPI siRNA antisense strand (unmodified); corresponding positions on NM_016186.3: 1535-1554
  source 1..19: mol_type = other RNA
agcagctcatgcatctcat

SEQ ID NO: 227 - RNA, 19 nt, synthetic construct
  misc_feature 1..19: note = Description of sequence: Description: ZPI siRNA antisense strand (unmodified); corresponding positions on NM_016186.3: 1160-1179
  source 1..19: mol_type = other RNA
tcaggattaatctcatcaa

SEQ ID NO: 228 - RNA, 19 nt, synthetic construct
  misc_feature 1..19: note = Description of sequence: Description: ZPI siRNA antisense strand (unmodified); corresponding positions on NM_016186.3: 1166-1185
  source 1..19: mol_type = other RNA
ttggtttcaggattaatct

SEQ ID NO: 229 - RNA, 19 nt, synthetic construct
  misc_feature 1..19: note = Description of sequence: Description: ZPI siRNA antisense strand (unmodified); corresponding positions on NM_016186.3: 1163-1182
  source 1..19: mol_type = other RNA
gtttcaggattaatctcat

SEQ ID NO: 230 - RNA, 19 nt, synthetic construct
  misc_feature 1..19: note = Description of sequence: Description: ZPI siRNA antisense strand (unmodified); corresponding positions on NM_016186.3: 1165-1184
  source 1..19: mol_type = other RNA
tggtttcaggattaatctc

SEQ ID NO: 231 - RNA, 19 nt, synthetic construct
  misc_feature 1..19: note = Description of sequence: Description: ZPI siRNA antisense strand (unmodified); corresponding positions on NM_016186.3: 1164-1183
  source 1..19: mol_type = other RNA
ggtttcaggattaatctca

SEQ ID NO: 232 - RNA, 19 nt, synthetic construct
  misc_feature 1..19: note = Description of sequence: Description: ZPI siRNA antisense strand (unmodified); corresponding positions on NM_016186.3: 1158-1177
  source 1..19: mol_type = other RNA
aggattaatctcatcaaac

SEQ ID NO: 233 - RNA, 19 nt, synthetic construct
  misc_feature 1..19: note = Description of sequence: Description: ZPI siRNA antisense strand (unmodified); corresponding positions on NM_016186.3: 992-1011
  source 1..19: mol_type = other RNA
tccttgtggatgaaggcaa

SEQ ID NO: 234 - RNA, 19 nt, synthetic construct
  misc_feature 1..19: note = Description of sequence: Description: ZPI siRNA antisense strand (unmodified); corresponding positions on NM_016186.3: 762-781
  source 1..19: mol_type = other RNA
gtgcctcatggagatcttt

SEQ ID NO: 235 - RNA, 19 nt, synthetic construct
  misc_feature 1..19: note = Description of sequence: Description: ZPI siRNA antisense strand (unmodified); corresponding positions on NM_016186.3: 1393-1412
  source 1..19: mol_type = other RNA
tctccatgaggaccaccag

SEQ ID NO: 236 - RNA, 19 nt, synthetic construct
  misc_feature 1..19: note = Description of sequence: Description: ZPI siRNA antisense strand (unmodified); corresponding positions on NM_016186.3: 997-1016
  source 1..19: mol_type = other RNA
caaaatccttgtggatgaa

SEQ ID NO: 237 - RNA, 19 nt, synthetic construct
  misc_feature 1..19: note = Description of sequence: Description: ZPI siRNA antisense strand (unmodified); corresponding positions on NM_016186.3: 763-782
  source 1..19: mol_type = other RNA
cgtgcctcatggagatctt

SEQ ID NO: 238 - RNA, 19 nt, synthetic construct
  misc_feature 1..19: note = Description of sequence: Description: ZPI siRNA antisense strand (unmodified); corresponding positions on NM_016186.3: 999-1018
  source 1..19: mol_type = other RNA
atcaaaatccttgtggatg

SEQ ID NO: 239 - RNA, 19 nt, synthetic construct
  misc_feature 1..19: note = Description of sequence: Description: ZPI siRNA antisense strand (unmodified); corresponding positions on NM_016186.3: 1161-1180
  source 1..19: mol_type = other RNA
ttcaggattaatctcatca

SEQ ID NO: 240 - RNA, 19 nt, synthetic construct
  misc_feature 1..19: note = Description of sequence: Description: ZPI siRNA antisense strand (unmodified); corresponding positions on NM_016186.3: 994-1013
  source 1..19: mol_type = other RNA
aatccttgtggatgaaggc

SEQ ID NO: 241 - RNA, 19 nt, synthetic construct
  misc_feature 1..19: note = Description of sequence: Description: ZPI siRNA antisense strand (unmodified); corresponding positions on NM_016186.3: 767-786
  source 1..19: mol_type = other RNA
ccatcgtgcctcatggaga

SEQ ID NO: 242 - RNA, 21 nt, synthetic construct
  misc_feature 1..21: note = Description of sequence: Description: ZPI siRNA sense strand (unmodified) corresponding positions on NM_016186.3: 991-1012
  source 1..21: mol_type = other RNA
tgccttcatccacaaggattt

SEQ ID NO: 243 - RNA, 21 nt, synthetic construct
  misc_feature 1..21: note = Description of sequence: Description: ZPI siRNA sense strand (unmodified) corresponding positions on NM_016186.3: 756-777
  source 1..21: mol_type = other RNA
tgcgaaagatctccatgaggc

SEQ ID NO: 244 - RNA, 21 nt, synthetic construct
  misc_feature 1..21: note = Description of sequence: Description: ZPI siRNA sense strand (unmodified) corresponding positions on NM_016186.3: 1390-1411
  source 1..21: mol_type = other RNA
gctggtggtcctcatggagaa

SEQ ID NO: 245 - RNA, 21 nt, synthetic construct
  misc_feature 1..21: note = Description of sequence: Description: ZPI siRNA sense strand (unmodified) corresponding positions on NM_016186.3: 757-778
  source 1..21: mol_type = other RNA
gcgaaagatctccatgaggca

SEQ ID NO: 246 - RNA, 21 nt, synthetic construct
  misc_feature 1..21: note = Description of sequence: Description: ZPI siRNA sense strand (unmodified) corresponding positions on NM_016186.3: 1531-1552
  source 1..21: mol_type = other RNA
gtatgagatgcatgagctgct

SEQ ID NO: 247 - RNA, 21 nt, synthetic construct
  misc_feature 1..21: note = Description of sequence: Description: ZPI siRNA sense strand (unmodified) corresponding positions on NM_016186.3: 1156-1177
  source 1..21: mol_type = other RNA
gtttgatgagattaatcctga

SEQ ID NO: 248 - RNA, 21 nt, synthetic construct
  misc_feature 1..21: note = Description of sequence: Description: ZPI siRNA sense strand (unmodified) corresponding positions on NM_016186.3: 1162-1183
  source 1..21: mol_type = other RNA
tgagattaatcctgaaaccaa

SEQ ID NO: 249 - RNA, 21 nt, synthetic construct
  misc_feature 1..21: note = Description of sequence: Description: ZPI siRNA sense strand (unmodified) corresponding positions on NM_016186.3: 1159-1180
  source 1..21: mol_type = other RNA
tgatgagattaatcctgaaac

SEQ ID NO: 250 - RNA, 21 nt, synthetic construct
  misc_feature 1..21: note = Description of sequence: Description: ZPI siRNA sense strand (unmodified) corresponding positions on NM_016186.3: 1161-1182
  source 1..21: mol_type = other RNA
atgagattaatcctgaaacca

SEQ ID NO: 251 - RNA, 21 nt, synthetic construct
  misc_feature 1..21: note = Description of sequence: Description: ZPI siRNA sense strand (unmodified) corresponding positions on NM_016186.3: 1160-1181
  source 1..21: mol_type = other RNA
gatgagattaatcctgaaacc

SEQ ID NO: 252 - RNA, 21 nt, synthetic construct
  misc_feature 1..21: note = Description of sequence: Description: ZPI siRNA sense strand (unmodified) corresponding positions on NM_016186.3: 1154-1175
  source 1..21: mol_type = other RNA
ctgtttgatgagattaatcct

SEQ ID NO: 253 - RNA, 21 nt, synthetic construct
  misc_feature 1..21: note = Description of sequence: Description: ZPI siRNA sense strand (unmodified) corresponding positions on NM_016186.3: 988-1009
  source 1..21: mol_type = other RNA
ttttgccttcatccacaagga

SEQ ID NO: 254 - RNA, 21 nt, synthetic construct
  misc_feature 1..21: note = Description of sequence: Description: ZPI siRNA sense strand (unmodified) corresponding positions on NM_016186.3: 758-779
  source 1..21: mol_type = other RNA
cgaaagatctccatgaggcac

SEQ ID NO: 255 - RNA, 21 nt, synthetic construct
  misc_feature 1..21: note = Description of sequence: Description: ZPI siRNA sense strand (unmodified) corresponding positions on NM_016186.3: 1389-1410
  source 1..21: mol_type = other RNA
tgctggtggtcctcatggaga

SEQ ID NO: 256 - RNA, 21 nt, synthetic construct
  misc_feature 1..21: note = Description of sequence: Description: ZPI siRNA sense strand (unmodified) corresponding positions on NM_016186.3: 993-1014
  source 1..21: mol_type = other RNA
ccttcatccacaaggattttg

SEQ ID NO: 257 - RNA, 21 nt, synthetic construct
  misc_feature 1..21: note = Description of sequence: Description: ZPI siRNA sense strand (unmodified) corresponding positions on NM_016186.3: 759-780
  source 1..21: mol_type = other RNA
gaaagatctccatgaggcacg

SEQ ID NO: 258 - RNA, 21 nt, synthetic construct
  misc_feature 1..21: note = Description of sequence: Description: ZPI siRNA sense strand (unmodified) corresponding positions on NM_016186.3: 995-1016
  source 1..21: mol_type = other RNA
ttcatccacaaggattttgat

SEQ ID NO: 259 - RNA, 21 nt, synthetic construct
  misc_feature 1..21: note = Description of sequence: Description: ZPI siRNA sense strand (unmodified) corresponding positions on NM_016186.3: 1157-1178
  source 1..21: mol_type = other RNA
tttgatgagattaatcctgaa

SEQ ID NO: 260 - RNA, 21 nt, synthetic construct
  misc_feature 1..21: note = Description of sequence: Description: ZPI siRNA sense strand (unmodified) corresponding positions on NM_016186.3: 990-1011
  source 1..21: mol_type = other RNA
ttgccttcatccacaaggatt

SEQ ID NO: 261 - RNA, 21 nt, synthetic construct
  misc_feature 1..21: note = Description of sequence: Description: ZPI siRNA sense strand (unmodified) corresponding positions on NM_016186.3: 763-784
  source 1..21: mol_type = other RNA
gatctccatgaggcacgatgg

SEQ ID NO: 262 - RNA, 21 nt, synthetic construct
  misc_feature 1..21: note = Description of sequence: Description: ZPI siRNA sense strand (unmodified) corresponding positions on NM_016186.3: 1387-1408
  source 1..21: mol_type = other RNA
catgctggtggtcctcatgga

SEQ ID NO: 263 - RNA, 21 nt, synthetic construct
  misc_feature 1..21: note = Description of sequence: Description: ZPI siRNA sense strand (unmodified) corresponding positions on NM_016186.3: 989-1010
  source 1..21: mol_type = other RNA
tttgccttcatccacaaggat

SEQ ID NO: 264 - RNA, 21 nt, synthetic construct
  misc_feature 1..21: note = Description of sequence: Description: ZPI siRNA sense strand (unmodified) corresponding positions on NM_016186.3: 992-1013
  source 1..21: mol_type = other RNA
gccttcatccacaaggatttt

SEQ ID NO: 265 - RNA, 21 nt, synthetic construct
  misc_feature 1..21: note = Description of sequence: Description: ZPI siRNA sense strand (unmodified) corresponding positions on NM_016186.3: 1370-1391
  source 1..21: mol_type = other RNA
taccaaggaaatgccaccatg

SEQ ID NO: 266 - RNA, 21 nt, synthetic construct
  misc_feature 1..21: note = Description of sequence: Description: ZPI siRNA sense strand (unmodified) corresponding positions on NM_016186.3: 1158-1179
  source 1..21: mol_type = other RNA
ttgatgagattaatcctgaaa

SEQ ID NO: 267 - RNA, 21 nt, synthetic construct
  misc_feature 1..21: note = Description of sequence: Description: ZPI siRNA sense strand (unmodified) corresponding positions on NM_016186.3: 994-1015
  source 1..21: mol_type = other RNA
cttcatccacaaggattttga

SEQ ID NO: 268 - RNA, 21 nt, synthetic construct
  misc_feature 1..21: note = Description of sequence: Description: ZPI siRNA sense strand (unmodified) corresponding positions on NM_016186.3: 760-781
  source 1..21: mol_type = other RNA
aaagatctccatgaggcacga

SEQ ID NO: 269 - RNA, 21 nt, synthetic construct
  misc_feature 1..21: note = Description of sequence: Description: ZPI siRNA sense strand (unmodified) corresponding positions on NM_016186.3: 1155-1176
  source 1..21: mol_type = other RNA
tgtttgatgagattaatcctg

SEQ ID NO: 270 - RNA, 21 nt, synthetic construct
  misc_feature 1..21: note = Description of sequence: Description: ZPI siRNA sense strand (unmodified) corresponding positions on NM_016186.3: 1388-1409
  source 1..21: mol_type = other RNA
atgctggtggtcctcatggag

SEQ ID NO: 271 - RNA, 21 nt, synthetic construct
  misc_feature 1..21: note = Description of sequence: Description: ZPI siRNA sense strand (unmodified) corresponding positions on NM_016186.3: 987-1008
  source 1..21: mol_type = other RNA
gttttgccttcatccacaagg

SEQ ID NO: 272 - RNA, 21 nt, synthetic construct
  misc_feature 1..21: note = Description of sequence: Description: ZPI siRNA sense strand (unmodified) corresponding positions on NM_016186.3: 1383-1404
  source 1..21: mol_type = other RNA
ccaccatgctggtggtcctca

SEQ ID NO: 273 - RNA, 21 nt, synthetic construct
  misc_feature 1..21: note = Description of sequence: Description: ZPI siRNA sense strand (unmodified) corresponding positions on NM_016186.3: 1384-1405
  source 1..21: mol_type = other RNA
caccatgctggtggtcctcat

SEQ ID NO: 274 - RNA, 21 nt, synthetic construct
  misc_feature 1..21: note = Description of sequence: Description: ZPI siRNA sense strand (unmodified) corresponding positions on NM_016186.3: 761-782
  source 1..21: mol_type = other RNA
aagatctccatgaggcacgat

SEQ ID NO: 275 - RNA, 21 nt, synthetic construct
  misc_feature 1..21: note = Description of sequence: Description: ZPI siRNA sense strand (unmodified) corresponding positions on NM_016186.3: 986-1007
  source 1..21: mol_type = other RNA
agttttgccttcatccacaag

SEQ ID NO: 276 - RNA, 21 nt, synthetic construct
  misc_feature 1..21: note = Description of sequence: Description: ZPI siRNA sense strand (unmodified) corresponding positions on NM_016186.3: 1385-1406
  source 1..21: mol_type = other RNA
accatgctggtggtcctcatg

SEQ ID NO: 277 - RNA, 21 nt, synthetic construct
  misc_feature 1..21: note = Description of sequence: Description: ZPI siRNA sense strand (unmodified) corresponding positions on NM_016186.3: 762-783
  source 1..21: mol_type = other RNA
agatctccatgaggcacgatg

SEQ ID NO: 278 - RNA, 21 nt, synthetic construct
  misc_feature 1..21: note = Description of sequence: Description: ZPI siRNA sense strand (unmodified) corresponding positions on NM_016186.3: 1386-1407
  source 1..21: mol_type = other RNA
ccatgctggtggtcctcatgg

SEQ ID NO: 279 - RNA, 21 nt, synthetic construct
  misc_feature 1..21: note = Description of sequence: Description: ZPI siRNA sense strand (unmodified) corresponding positions on NM_016186.3: 1321-1342
  source 1..21: mol_type = other RNA
tgcctccacctttgacaagaa

SEQ ID NO: 280 - RNA, 21 nt, synthetic construct
  misc_feature 1..21: note = Description of sequence: Description: ZPI siRNA sense strand (unmodified) corresponding positions on NM_016186.3: 1323-1344
  source 1..21: mol_type = other RNA
cctccacctttgacaagaatt

SEQ ID NO: 281 - RNA, 21 nt, synthetic construct
  misc_feature 1..21: note = Description of sequence: Description: ZPI siRNA sense strand (unmodified) corresponding positions on NM_016186.3: 1285-1306
  source 1..21: mol_type = other RNA
cattaaggtgcccatgatgta

SEQ ID NO: 282 - RNA, 21 nt, synthetic construct
  misc_feature 1..21: note = Description of sequence: Description: ZPI siRNA sense strand (unmodified) corresponding positions on NM_016186.3: 1364-1385
  source 1..21: mol_type = other RNA
ctgccctaccaaggaaatgcc

SEQ ID NO: 283 - RNA, 21 nt, synthetic construct
  misc_feature 1..21: note = Description of sequence: Description: ZPI siRNA sense strand (unmodified) corresponding positions on NM_016186.3: 1360-1381
  source 1..21: mol_type = other RNA
caaactgccctaccaaggaaa

SEQ ID NO: 284 - RNA, 21 nt, synthetic construct
  misc_feature 1..21: note = Description of sequence: Description: ZPI siRNA sense strand (unmodified) corresponding positions on NM_016186.3: 1359-1380
  source 1..21: mol_type = other RNA
tcaaactgccctaccaaggaa

SEQ ID NO: 285 - RNA, 21 nt, synthetic construct
  misc_feature 1..21: note = Description of sequence: Description: ZPI siRNA sense strand (unmodified) corresponding positions on NM_016186.3: 1324-1345
  source 1..21: mol_type = other RNA
ctccacctttgacaagaattt

SEQ ID NO: 286 - RNA, 21 nt, synthetic construct
  misc_feature 1..21: note = Description of sequence: Description: ZPI siRNA sense strand (unmodified) corresponding positions on NM_016186.3: 1255-1276
  source 1..21: mol_type = other RNA
cgacactttccacctggacaa

SEQ ID NO: 287 - RNA, 21 nt, synthetic construct
  misc_feature 1..21: note = Description of sequence: Description: ZPI siRNA sense strand (unmodified) corresponding positions on NM_016186.3: 1259-1280
  source 1..21: mol_type = other RNA
actttccacctggacaagtac

SEQ ID NO: 288 - RNA, 21 nt, synthetic construct
  misc_feature 1..21: note = Description of sequence: Description: ZPI siRNA sense strand (unmodified) corresponding positions on NM_016186.3: 1361-1382
  source 1..21: mol_type = other RNA
aaactgccctaccaaggaaat

SEQ ID NO: 289 - RNA, 21 nt, synthetic construct
  misc_feature 1..21: note = Description of sequence: Description: ZPI siRNA sense strand (unmodified) corresponding positions on NM_016186.3: 1363-1384
  source 1..21: mol_type = other RNA
actgccctaccaaggaaatgc

SEQ ID NO: 290 - RNA, 21 nt, synthetic construct
  misc_feature 1..21: note = Description of sequence: Description: ZPI siRNA sense strand (unmodified) corresponding positions on NM_016186.3: 1258-1279
  source 1..21: mol_type = other RNA
cactttccacctggacaagta

SEQ ID NO: 291 - RNA, 21 nt, synthetic construct
  misc_feature 1..21: note = Description of sequence: Description: ZPI siRNA sense strand (unmodified) corresponding positions on NM_016186.3: 1284-1305
  source 1..21: mol_type = other RNA
ccattaaggtgcccatgatgt

SEQ ID NO: 292 - RNA, 21 nt, synthetic construct
  misc_feature 1..21: note = Description of sequence: Description: ZPI siRNA sense strand (unmodified) corresponding positions on NM_016186.3: 1320-1341
  source 1..21: mol_type = other RNA
ttgcctccacctttgacaaga

SEQ ID NO: 293 - RNA, 21 nt, synthetic construct
  misc_feature 1..21: note = Description of sequence: Description: ZPI siRNA sense strand (unmodified) corresponding positions on NM_016186.3: 1261-1282
  source 1..21: mol_type = other RNA
tttccacctggacaagtacaa

SEQ ID NO: 294 - RNA, 21 nt, synthetic construct
  misc_feature 1..21: note = Description of sequence: Description: ZPI siRNA sense strand (unmodified) corresponding positions on NM_016186.3: 1356-1377
  source 1..21: mol_type = other RNA
tcctcaaactgccctaccaag

SEQ ID NO: 295 - RNA, 21 nt, synthetic construct
  misc_feature 1..21: note = Description of sequence: Description: ZPI siRNA sense strand (unmodified) corresponding positions on NM_016186.3: 1362-1383
  source 1..21: mol_type = other RNA
aactgccctaccaaggaaatg

SEQ ID NO: 296 - RNA, 21 nt, synthetic construct
  misc_feature 1..21: note = Description of sequence: Description: ZPI siRNA sense strand (unmodified) corresponding positions on NM_016186.3: 1357-1378
  source 1..21: mol_type = other RNA
cctcaaactgccctaccaagg

SEQ ID NO: 297 - RNA, 21 nt, synthetic construct
  misc_feature 1..21: note = Description of sequence: Description: ZPI siRNA sense strand (unmodified) corresponding positions on NM_016186.3: 1355-1376
  source 1..21: mol_type = other RNA
gtcctcaaactgccctaccaa

SEQ ID NO: 298 - RNA, 21 nt, synthetic construct
  misc_feature 1..21: note = Description of sequence: Description: ZPI siRNA sense strand (unmodified) corresponding positions on NM_016186.3: 1256-1277
  source 1..21: mol_type = other RNA
gacactttccacctggacaag

SEQ ID NO: 299 - RNA, 21 nt, synthetic construct
  misc_feature 1..21: note = Description of sequence: Description: ZPI siRNA sense strand (unmodified) corresponding positions on NM_016186.3: 1319-1340
  source 1..21: mol_type = other RNA
tttgcctccacctttgacaag

SEQ ID NO: 300 - RNA, 21 nt, synthetic construct
  misc_feature 1..21: note = Description of sequence: Description: ZPI siRNA sense strand (unmodified) corresponding positions on NM_016186.3: 1257-1278
  source 1..21: mol_type = other RNA
acactttccacctggacaagt

SEQ ID NO: 301 - RNA, 21 nt, synthetic construct
  misc_feature 1..21: note = Description of sequence: Description: ZPI siRNA sense strand (unmodified) corresponding positions on NM_016186.3: 1262-1283
  source 1..21: mol_type = other RNA
ttccacctggacaagtacaag

SEQ ID NO: 302 - RNA, 21 nt, synthetic construct
  misc_feature 1..21: note = Description of sequence: Description: ZPI siRNA sense strand (unmodified) corresponding positions on NM_016186.3: 1260-1281
  source 1..21: mol_type = other RNA
ctttccacctggacaagtaca

SEQ ID NO: 303 - RNA, 21 nt, synthetic construct
  misc_feature 1..21: note = Description of sequence: Description: ZPI siRNA sense strand (unmodified) corresponding positions on NM_016186.3: 1358-1379
  source 1..21: mol_type = other RNA
ctcaaactgccctaccaagga

SEQ ID NO: 304 - RNA, 21 nt, synthetic construct
  misc_feature 1..21: note = Description of sequence: Description: ZPI siRNA sense strand (unmodified) corresponding positions on NM_016186.3: 1198-1219
  source 1..21: mol_type = other RNA
ttacatcttgttcaaagggaa

SEQ ID NO: 305 - RNA, 21 nt, synthetic construct
  misc_feature 1..21: note = Description of sequence: Description: ZPI siRNA sense strand (unmodified) corresponding positions on NM_016186.3: 1381-1402
  source 1..21: mol_type = other RNA
tgccaccatgctggtggtcct

SEQ ID NO: 306 - RNA, 21 nt, synthetic construct
  misc_feature 1..21: note = Description of sequence: Description: ZPI siRNA sense strand (unmodified) corresponding positions on NM_016186.3: 1038-1059
  source 1..21: mol_type = other RNA
tatccaagaggtattttgata

SEQ ID NO: 307 - RNA, 21 nt, synthetic construct
  misc_feature 1..21: note = Description of sequence: Description: ZPI siRNA sense strand (unmodified) corresponding positions on NM_016186.3: 1378-1399
  source 1..21: mol_type = other RNA
aaatgccaccatgctggtggt

SEQ ID NO: 308 - RNA, 21 nt, synthetic construct
  misc_feature 1..21: note = Description of sequence: Description: ZPI siRNA sense strand (unmodified) corresponding positions on NM_016186.3: 1197-1218
  source 1..21: mol_type = other RNA
attacatcttgttcaaaggga

SEQ ID NO: 309 - RNA, 21 nt, synthetic construct
  misc_feature 1..21: note = Description of sequence: Description: ZPI siRNA sense strand (unmodified) corresponding positions on NM_016186.3: 766-787
  source 1..21: mol_type = other RNA
ctccatgaggcacgatggcaa

SEQ ID NO: 310 - RNA, 21 nt, synthetic construct
  misc_feature 1..21: note = Description of sequence: Description: ZPI siRNA sense strand (unmodified) corresponding positions on NM_016186.3: 1721-1742
  source 1..21: mol_type = other RNA
tccatgcctcctgtcatcaaa

SEQ ID NO: 311 - RNA, 21 nt, synthetic construct
  misc_feature 1..21: note = Description of sequence: Description: ZPI siRNA sense strand (unmodified) corresponding positions on NM_016186.3: 1719-1740
  source 1..21: mol_type = other RNA
attccatgcctcctgtcatca

SEQ ID NO: 312 - RNA, 21 nt, synthetic construct
  misc_feature 1..21: note = Description of sequence: Description: ZPI siRNA sense strand (unmodified) corresponding positions on NM_016186.3: 1373-1394
  source 1..21: mol_type = other RNA
caaggaaatgccaccatgctg

SEQ ID NO: 313 - RNA, 21 nt, synthetic construct
  misc_feature 1..21: note = Description of sequence: Description: ZPI siRNA sense strand (unmodified) corresponding positions on NM_016186.3: 1392-1413
  source 1..21: mol_type = other RNA
tggtggtcctcatggagaaaa

SEQ ID NO: 314 - RNA, 21 nt, synthetic construct
  misc_feature 1..21: note = Description of sequence: Description: ZPI siRNA sense strand (unmodified) corresponding positions on NM_016186.3: 1202-1223
  source 1..21: mol_type = other RNA
atcttgttcaaagggaaatgg

SEQ ID NO: 315 - RNA, 21 nt, synthetic construct
  misc_feature 1..21: note = Description of sequence: Description: ZPI siRNA sense strand (unmodified) corresponding positions on NM_016186.3: 1374-1395
  source 1..21: mol_type = other RNA
aaggaaatgccaccatgctgg

SEQ ID NO: 316 - RNA, 21 nt, synthetic construct
  misc_feature 1..21: note = Description of sequence: Description: ZPI siRNA sense strand (unmodified) corresponding positions on NM_016186.3: 1322-1343
  source 1..21: mol_type = other RNA
gcctccacctttgacaagaat

SEQ ID NO: 317 - RNA, 21 nt, synthetic construct
  misc_feature 1..21: note = Description of sequence: Description: ZPI siRNA sense strand (unmodified) corresponding positions on NM_016186.3: 985-1006
  source 1..21: mol_type = other RNA
gagttttgccttcatccacaa

SEQ ID NO: 318 - RNA, 21 nt, synthetic construct
  misc_feature 1..21: note = Description of sequence: Description: ZPI siRNA sense strand (unmodified) corresponding positions on NM_016186.3: 754-775
  source 1..21: mol_type = other RNA
gctgcgaaagatctccatgag

SEQ ID NO: 319 - RNA, 21 nt, synthetic construct
  misc_feature 1..21: note = Description of sequence: Description: ZPI siRNA sense strand (unmodified) corresponding positions on NM_016186.3: 1317-1338
  source 1..21: mol_type = other RNA
agtttgcctccacctttgaca

SEQ ID NO: 320 - RNA, 21 nt, synthetic construct
  misc_feature 1..21: note = Description of sequence: Description: ZPI siRNA sense strand (unmodified) corresponding positions on NM_016186.3: 1318-1339
  source 1..21: mol_type = other RNA
gtttgcctccacctttgacaa

SEQ ID NO: 321 - RNA, 21 nt, synthetic construct
  misc_feature 1..21: note = Description of sequence: Description: ZPI siRNA sense strand (unmodified) corresponding positions on NM_016186.3: 1201-1222
  source 1..21: mol_type = other RNA
catcttgttcaaagggaaatg

SEQ ID NO: 322 - RNA, 21 nt, synthetic construct
  misc_feature 1..21: note = Description of sequence: Description: ZPI siRNA sense strand (unmodified) corresponding positions on NM_016186.3: 984-1005
  source 1..21: mol_type = other RNA
ggagttttgccttcatccaca

SEQ ID NO: 323 - RNA, 21 nt, synthetic construct
  misc_feature 1..21: note = Description of sequence: Description: ZPI siRNA sense strand (unmodified) corresponding positions on NM_016186.3: 755-776
  source 1..21: mol_type = other RNA
ctgcgaaagatctccatgagg

SEQ ID NO: 324 - RNA, 21 nt, synthetic construct
  misc_feature 1..21: note = Description of sequence: Description: ZPI siRNA sense strand (unmodified) corresponding positions on NM_016186.3: 1722-1743
  source 1..21: mol_type = other RNA
ccatgcctcctgtcatcaaag

SEQ ID NO: 325 - RNA, 21 nt, synthetic construct
  misc_feature 1..21: note = Description of sequence: Description: ZPI siRNA sense strand (unmodified) corresponding positions on NM_016186.3: 1794-1815
  source 1..21: mol_type = other RNA
tgtttctgggcagggtggtga

SEQ ID NO: 326 - RNA, 21 nt, synthetic construct
  misc_feature 1..21: note = Description of sequence: Description: ZPI siRNA sense strand (unmodified) corresponding positions on NM_016186.3: 750-771
  source 1..21: mol_type = other RNA
gcctgctgcgaaagatctcca

SEQ ID NO: 327 - RNA, 21 nt, synthetic construct
  misc_feature 1..21: note = Description of sequence: Description: ZPI siRNA sense strand (unmodified) corresponding positions on NM_016186.3: 1152-1173
  source 1..21: mol_type = other RNA
aactgtttgatgagattaatc

SEQ ID NO: 328 - RNA, 21 nt, synthetic construct
  misc_feature 1..21: note = Description of sequence: Description: ZPI siRNA sense strand (unmodified) corresponding positions on NM_016186.3: 1724-1745
  source 1..21: mol_type = other RNA
atgcctcctgtcatcaaagtg

SEQ ID NO: 329 - RNA, 21 nt, synthetic construct
  misc_feature 1..21: note = Description of sequence: Description: ZPI siRNA sense strand (unmodified) corresponding positions on NM_016186.3: 1530-1551
  source 1..21: mol_type = other RNA
agtatgagatgcatgagctgc

SEQ ID NO: 330 - RNA, 21 nt, synthetic construct
  misc_feature 1..21: note = Description of sequence: Description: ZPI siRNA sense strand (unmodified) corresponding positions on NM_016186.3: 1529-1550
  source 1..21: mol_type = other RNA
aagtatgagatgcatgagctg

SEQ ID NO: 331 - RNA, 21 nt, synthetic construct
  misc_feature 1..21: note = Description of sequence: Description: ZPI siRNA sense strand (unmodified) corresponding positions on NM_016186.3: 1354-1375
  source 1..21: mol_type = other RNA
tgtcctcaaactgccctacca

SEQ ID NO: 332 - RNA, 21 nt, synthetic construct
  misc_feature 1..21: note = Description of sequence: Description: ZPI siRNA sense strand (unmodified) corresponding positions on NM_016186.3: 1153-1174
  source 1..21: mol_type = other RNA
actgtttgatgagattaatcc

SEQ ID NO: 333 - RNA, 21 nt, synthetic construct
  misc_feature 1..21: note = Description of sequence: Description: ZPI siRNA sense strand (unmodified) corresponding positions on NM_016186.3: 1282-1303
  source 1..21: mol_type = other RNA
gaccattaaggtgcccatgat

SEQ ID NO: 334 - RNA, 21 nt, synthetic construct
  misc_feature 1..21: note = Description of sequence: Description: ZPI siRNA sense strand (unmodified) corresponding positions on NM_016186.3: 1283-1304
  source 1..21: mol_type = other RNA
accattaaggtgcccatgatg

SEQ ID NO: 335 - RNA, 21 nt, synthetic construct
  misc_feature 1..21: note = Description of sequence: Description: ZPI siRNA sense strand (unmodified) corresponding positions on NM_016186.3: 1795-1816
  source 1..21: mol_type = other RNA
gtttctgggcagggtggtgaa

SEQ ID NO: 336 - RNA, 21 nt, synthetic construct
  misc_feature 1..21: note = Description of sequence: Description: ZPI siRNA sense strand (unmodified) corresponding positions on NM_016186.3: 1791-1812
  source 1..21: mol_type = other RNA
ttctgtttctgggcagggtgg

SEQ ID NO: 337 - RNA, 21 nt, synthetic construct
  misc_feature 1..21: note = Description of sequence: Description: ZPI siRNA sense strand (unmodified) corresponding positions on NM_016186.3: 1500-1521
  source 1..21: mol_type = other RNA
ttttctttccgaagttcaagc

SEQ ID NO: 338 - RNA, 21 nt, synthetic construct
  misc_feature 1..21: note = Description of sequence: Description: ZPI siRNA sense strand (unmodified) corresponding positions on NM_016186.3: 1501-1522
  source 1..21: mol_type = other RNA
tttctttccgaagttcaagct

SEQ ID NO: 339 - RNA, 21 nt, synthetic construct
  misc_feature 1..21: note = Description of sequence: Description: ZPI siRNA sense strand (unmodified) corresponding positions on NM_016186.3: 1792-1813
  source 1..21: mol_type = other RNA
tctgtttctgggcagggtggt

SEQ ID NO: 340 - RNA, 21 nt, synthetic construct
  misc_feature 1..21: note = Description of sequence: Description: ZPI siRNA sense strand (unmodified) corresponding positions on NM_016186.3: 1353-1374
  source 1..21: mol_type = other RNA
atgtcctcaaactgccctacc

SEQ ID NO: 341 - RNA, 21 nt, synthetic construct
  misc_feature 1..21: note = Description of sequence: Description: ZPI siRNA sense strand (unmodified) corresponding positions on NM_016186.3: 1254-1275
  source 1..21: mol_type = other RNA
tcgacactttccacctggaca

SEQ ID NO: 342 - RNA, 19 nt, synthetic construct
  misc_feature 1..19: note = Description of sequence: Description: ZPI siRNA sense strand (unmodified) corresponding positions on NM_016186.3: 995-1014
  source 1..19: mol_type = other RNA
ccttcatccacaaggattt

SEQ ID NO: 343 - RNA, 19 nt, synthetic construct
  misc_feature 1..19: note = Description of sequence: Description: ZPI siRNA sense strand (unmodified) corresponding positions on NM_016186.3: 760-779
  source 1..19: mol_type = other RNA
cgaaagatctccatgaggc

SEQ ID NO: 344 - RNA, 19 nt, synthetic construct
  misc_feature 1..19: note = Description of sequence: Description: ZPI siRNA sense strand (unmodified) corresponding positions on NM_016186.3: 1394-1413
  source 1..19: mol_type = other RNA
tggtggtcctcatggagaa

SEQ ID NO: 345 - RNA, 19 nt, synthetic construct
  misc_feature 1..19: note = Description of sequence: Description: ZPI siRNA sense strand (unmodified) corresponding positions on NM_016186.3: 761-780
  source 1..19: mol_type = other RNA
gaaagatctccatgaggca

SEQ ID NO: 346 - RNA, 19 nt, synthetic construct
  misc_feature 1..19: note = Description of sequence: Description: ZPI siRNA sense strand (unmodified) corresponding positions on NM_016186.3: 1535-1554
  source 1..19: mol_type = other RNA
atgagatgcatgagctgct

SEQ ID NO: 347 - RNA, 19 nt, synthetic construct
  misc_feature 1..19: note = Description of sequence: Description: ZPI siRNA sense strand (unmodified) corresponding positions on NM_016186.3: 1160-1179
  source 1..19: mol_type = other RNA
ttgatgagattaatcctga

SEQ ID NO: 348 - RNA, 19 nt, synthetic construct
  misc_feature 1..19: note = Description of sequence: Description: ZPI siRNA sense strand (unmodified) corresponding positions on NM_016186.3: 1166-1185
  source 1..19: mol_type = other RNA
agattaatcctgaaaccaa

SEQ ID NO: 349 - RNA, 19 nt, synthetic construct
  misc_feature 1..19: note = Description of sequence: Description: ZPI siRNA sense strand (unmodified) corresponding positions on NM_016186.3: 1163-1182
  source 1..19: mol_type = other RNA
atgagattaatcctgaaac

SEQ ID NO: 350 - RNA, 19 nt, synthetic construct
  misc_feature 1..19: note = Description of sequence: Description: ZPI siRNA sense strand (unmodified) corresponding positions on NM_016186.3: 1165-1184
  source 1..19: mol_type = other RNA
gagattaatcctgaaacca

SEQ ID NO: 351 - RNA, 19 nt, synthetic construct
  misc_feature 1..19: note = Description of sequence: Description: ZPI siRNA sense strand (unmodified) corresponding positions on NM_016186.3: 1164-1183
  source 1..19: mol_type = other RNA
tgagattaatcctgaaacc

SEQ ID NO: 352 - RNA, 19 nt, synthetic construct
  misc_feature 1..19: note = Description of sequence: Description: ZPI siRNA sense strand (unmodified) corresponding positions on NM_016186.3: 1158-1177
  source 1..19: mol_type = other RNA
gtttgatgagattaatcct

SEQ ID NO: 353 - RNA, 19 nt, synthetic construct
  misc_feature 1..19: note = Description of sequence: Description: ZPI siRNA sense strand (unmodified) corresponding positions on NM_016186.3: 992-1011
  source 1..19: mol_type = other RNA
ttgccttcatccacaagga

SEQ ID NO: 354 - RNA, 19 nt, synthetic construct
  misc_feature 1..19: note = Description of sequence: Description: ZPI siRNA sense strand (unmodified) corresponding positions on NM_016186.3: 762-781
  source 1..19: mol_type = other RNA
aaagatctccatgaggcac

SEQ ID NO: 355 - RNA, 19 nt, synthetic construct
  misc_feature 1..19: note = Description of sequence: Description: ZPI siRNA sense strand (unmodified) corresponding positions on NM_016186.3: 1393-1412
  source 1..19: mol_type = other RNA
ctggtggtcctcatggaga

SEQ ID NO: 356 - RNA, 19 nt, synthetic construct
  misc_feature 1..19: note = Description of sequence: Description: ZPI siRNA sense strand (unmodified) corresponding positions on NM_016186.3: 997-1016
  source 1..19: mol_type = other RNA
ttcatccacaaggattttg

SEQ ID NO: 357 - RNA, 19 nt, synthetic construct
  misc_feature 1..19: note = Description of sequence: Description: ZPI siRNA sense strand (unmodified) corresponding positions on NM_016186.3: 763-782
  source 1..19: mol_type = other RNA
aagatctccatgaggcacg

SEQ ID NO: 358 - RNA, 19 nt, synthetic construct
  misc_feature 1..19: note = Description of sequence: Description: ZPI siRNA sense strand (unmodified) corresponding positions on NM_016186.3: 999-1018
  source 1..19: mol_type = other RNA
catccacaaggattttgat

SEQ ID NO: 359 - RNA, 19 nt, synthetic construct
  misc_feature 1..19: note = Description of sequence: Description: ZPI siRNA sense strand (unmodified) corresponding positions on NM_016186.3: 1161-1180
  source 1..19: mol_type = other RNA
tgatgagattaatcctgaa

SEQ ID NO: 360 - RNA, 19 nt, synthetic construct
  misc_feature 1..19: note = Description of sequence: Description: ZPI siRNA sense strand (unmodified) corresponding positions on NM_016186.3: 994-1013
  source 1..19: mol_type = other RNA
gccttcatccacaaggatt

SEQ ID NO: 361 - RNA, 19 nt, synthetic construct
  misc_feature 1..19: note = Description of sequence: Description: ZPI siRNA sense strand (unmodified) corresponding positions on NM_016186.3: 767-786
  source 1..19: mol_type = other RNA
tctccatgaggcacgatgg

SEQ ID NO: 362 - RNA, 23 nt, synthetic construct
  source 1..23: mol_type = other RNA
  misc_feature 1..23: note = Antisense: ETXS632; corresponding to SEQ ID NO: 122
  modified_base 1: mod_base = OTHER; note = 2'O-methyl-adenosine
  modified_base 2: mod_base = OTHER; note = 2'Fluoro-adenosine
  modified_base 3: mod_base = OTHER; note = 2'O-methyl-adenosine
  modified_base 4: mod_base = um
  modified_base 5: mod_base = cm
  modified_base 6: mod_base = OTHER; note = 2' Fluoro-cytidine
  modified_base 7: mod_base = um
  modified_base 8: mod_base = OTHER; note = 2' Fluoro-uridine
  modified_base 9: mod_base = OTHER; note = 2' Fluoro-guanosine
  modified_base 10: mod_base = um
  modified_base 11: mod_base = gm
  modified_base 12: mod_base = gm
  modified_base 13: mod_base = OTHER; note = 2'O-methyl-adenosine
  modified_base 14: mod_base = OTHER; note = 2' Fluoro-uridine
  modified_base 15: mod_base = gm
  modified_base 16: mod_base = OTHER; note = 2'Fluoro-adenosine
  modified_base 17: mod_base = OTHER; note = 2'O-methyl-adenosine
  modified_base 18: mod_base = gm
  modified_base 19: mod_base = gm
  modified_base 20: mod_base = cm
  modified_base 21: mod_base = OTHER; note = 2'O-methyl-adenosine
  modified_base 22: mod_base = OTHER; note = 2'O-methyl-adenosine
  modified_base 23: mod_base = OTHER; note = 2'O-methyl-adenosine
  modified_base 1^2: mod_base = OTHER; note = phosphorothioate linkage
  modified_base 2^3: mod_base = OTHER; note = phosphorothioate linkage
  modified_base 21^22: mod_base = OTHER; note = phosphorothioate linkage
  modified_base 22^23: mod_base = OTHER; note = phosphorothioate linkage
aaatccttgtggatgaaggcaaa

SEQ ID NO: 363 - RNA, 23 nt, synthetic construct
  source 1..23: mol_type = other RNA
  misc_feature 1..23: note = Antisense: ETXS634; corresponding to SEQ ID NO: 123
  modified_base 1: mod_base = gm
  modified_base 2: mod_base = OTHER; note = 2' Fluoro-cytidine
  modified_base 3: mod_base = cm
  modified_base 4: mod_base = um
  modified_base 5: mod_base = cm
  modified_base 6: mod_base = OTHER; note = 2'Fluoro-adenosine
  modified_base 7: mod_base = um
  modified_base 8: mod_base = OTHER; note = 2' Fluoro-guanosine
  modified_base 9: mod_base = OTHER; note = 2' Fluoro-guanosine
  modified_base 10: mod_base = OTHER; note = 2'O-methyl-adenosine
  modified_base 11: mod_base = gm
  modified_base 12: mod_base = OTHER; note = 2'O-methyl-adenosine
  modified_base 13: mod_base = um
  modified_base 14: mod_base = OTHER; note = 2' Fluoro-cytidine
  modified_base 15: mod_base = um
  modified_base 16: mod_base = OTHER; note = 2' Fluoro-uridine
  modified_base 17: mod_base = um
  modified_base 18: mod_base = cm
  modified_base 19: mod_base = gm
  modified_base 20: mod_base = cm
  modified_base 21: mod_base = OTHER; note = 2'O-methyl-adenosine
  modified_base 22: mod_base = gm
  modified_base 23: mod_base = cm
  modified_base 1^2: mod_base = OTHER; note = phosphorothioate linkage
  modified_base 2^3: mod_base = OTHER; note = phosphorothioate linkage
  modified_base 21^22: mod_base = OTHER; note = phosphorothioate linkage
  modified_base 22^23: mod_base = OTHER; note = phosphorothioate linkage
gcctcatggagatctttcgcagc

SEQ ID NO: 364 - RNA, 23 nt, synthetic construct
  source 1..23: mol_type = other RNA
  misc_feature 1..23: note = Antisense: ETXS636; corresponding to SEQ ID NO: 124
  modified_base 1: mod_base = um
  modified_base 2: mod_base = OTHER; note = 2' Fluoro-uridine
  modified_base 3: mod_base = cm
  modified_base 4: mod_base = um
  modified_base 5: mod_base = cm
  modified_base 6: mod_base = OTHER; note = 2' Fluoro-cytidine
  modified_base 7: mod_base = OTHER; note = 2'O-methyl-adenosine
  modified_base 8: mod_base = OTHER; note = 2' Fluoro-uridine
  modified_base 9: mod_base = OTHER; note = 2' Fluoro-guanosine
  modified_base 10: mod_base = OTHER; note = 2'O-methyl-adenosine
  modified_base 11: mod_base = gm
  modified_base 12: mod_base = gm
  modified_base 13: mod_base = OTHER; note = 2'O-methyl-adenosine
  modified_base 14: mod_base = OTHER; note = 2' Fluoro-cytidine
  modified_base 15: mod_base = cm
  modified_base 16: mod_base = OTHER; note = 2'Fluoro-adenosine
  modified_base 17: mod_base = cm
  modified_base 18: mod_base = cm
  modified_base 19: mod_base = OTHER; note = 2'O-methyl-adenosine
  modified_base 20: mod_base = gm
  modified_base 21: mod_base = cm
  modified_base 22: mod_base = OTHER; note = 2'O-methyl-adenosine
  modified_base 23: mod_base = um
  modified_base 1^2: mod_base = OTHER; note = phosphorothioate linkage
  modified_base 2^3: mod_base = OTHER; note = phosphorothioate linkage
  modified_base 21^22: mod_base = OTHER; note = phosphorothioate linkage
  modified_base 22^23: mod_base = OTHER; note = phosphorothioate linkage
ttctccatgaggaccaccagcat

SEQ ID NO: 365 - RNA, 23 nt, synthetic construct
  source 1..23: mol_type = other RNA
  misc_feature 1..23: note = Antisense: ETXS638; corresponding to SEQ ID NO: 125
  modified_base 1: mod_base = um
  modified_base 2: mod_base = OTHER; note = 2' Fluoro-guanosine
  modified_base 3: mod_base = cm
  modified_base 4: mod_base = cm
  modified_base 5: mod_base = um
  modified_base 6: mod_base = OTHER; note = 2' Fluoro-cytidine
  modified_base 7: mod_base = OTHER; note = 2'O-methyl-adenosine
  modified_base 8: mod_base = OTHER; note = 2' Fluoro-uridine
  modified_base 9: mod_base = OTHER; note = 2' Fluoro-guanosine
  modified_base 10: mod_base = gm
  modified_base 11: mod_base = OTHER; note = 2'O-methyl-adenosine
  modified_base 12: mod_base = gm
  modified_base 13: mod_base = OTHER; note = 2'O-methyl-adenosine
  modified_base 14: mod_base = OTHER; note = 2' Fluoro-uridine
  modified_base 15: mod_base = cm
  modified_base 16: mod_base = OTHER; note = 2' Fluoro-uridine
  modified_base 17: mod_base = um
  modified_base 18: mod_base = um
  modified_base 19: mod_base = cm
  modified_base 20: mod_base = gm
  modified_base 21: mod_base = cm
  modified_base 22: mod_base = OTHER; note = 2'O-methyl-adenosine
  modified_base 23: mod_base = gm
  modified_base 1^2: mod_base = OTHER; note = phosphorothioate linkage
  modified_base 2^3: mod_base = OTHER; note = phosphorothioate linkage
  modified_base 21^22: mod_base = OTHER; note = phosphorothioate linkage
  modified_base 22^23: mod_base = OTHER; note = phosphorothioate linkage
tgcctcatggagatctttcgcag

SEQ ID NO: 366 - RNA, 23 nt, synthetic construct
  source 1..23: mol_type = other RNA
  misc_feature 1..23: note = Antisense: ETXS640; corresponding to SEQ ID NO: 126
  modified_base 1: mod_base = OTHER; note = 2'O-methyl-adenosine
  modified_base 2: mod_base = OTHER; note = 2' Fluoro-guanosine
  modified_base 3: mod_base = cm
  modified_base 4: mod_base = OTHER; note = 2'O-methyl-adenosine
  modified_base 5: mod_base = gm
  modified_base 6: mod_base = OTHER; note = 2' Fluoro-cytidine
  modified_base 7: mod_base = um
  modified_base 8: mod_base = OTHER; note = 2' Fluoro-cytidine
  modified_base 9: mod_base = OTHER; note = 2'Fluoro-adenosine
  modified_base 10: mod_base = um
  modified_base 11: mod_base = gm
  modified_base 12: mod_base = cm
  modified_base 13: mod_base = OTHER; note = 2'O-methyl-adenosine
  modified_base 14: mod_base = OTHER; note = 2' Fluoro-uridine
  modified_base 15: mod_base = cm
  modified_base 16: mod_base = OTHER; note = 2' Fluoro-uridine
  modified_base 17: mod_base = cm
  modified_base 18: mod_base = OTHER; note = 2'O-methyl-adenosine
  modified_base 19: mod_base = um
  modified_base 20: mod_base = OTHER; note = 2'O-methyl-adenosine
  modified_base 21: mod_base = cm
  modified_base 22: mod_base = um
  modified_base 23: mod_base = um
  modified_base 1^2: mod_base = OTHER; note = phosphorothioate linkage
  modified_base 2^3: mod_base = OTHER; note = phosphorothioate linkage
  modified_base 21^22: mod_base = OTHER; note = phosphorothioate linkage
  modified_base 22^23: mod_base = OTHER; note = phosphorothioate linkage
agcagctcatgcatctcatactt

SEQ ID NO: 367 - RNA, 23 nt, synthetic construct
  source 1..23: mol_type = other RNA
  misc_feature 1..23: note = Antisense: ETXS642; corresponding to SEQ ID NO: 127
  modified_base 1: mod_base = um
  modified_base 2: mod_base = OTHER; note = 2' Fluoro-cytidine
  modified_base 3: mod_base = OTHER; note = 2'O-methyl-adenosine
  modified_base 4: mod_base = gm
  modified_base 5: mod_base = gm
  modified_base 6: mod_base = OTHER; note = 2'Fluoro-adenosine
  modified_base 7: mod_base = um
  modified_base 8: mod_base = OTHER; note = 2' Fluoro-uridine
  modified_base 9: mod_base = OTHER; note = 2'Fluoro-adenosine
  modified_base 10: mod_base = OTHER; note = 2'O-methyl-adenosine
  modified_base 11: mod_base = um
  modified_base 12: mod_base = cm
  modified_base 13: mod_base = um
  modified_base 14: mod_base = OTHER; note = 2' Fluoro-cytidine
  modified_base 15: mod_base = OTHER; note = 2'O-methyl-adenosine
  modified_base 16: mod_base = OTHER; note = 2' Fluoro-uridine
  modified_base 17: mod_base = cm
  modified_base 18: mod_base = OTHER; note = 2'O-methyl-adenosine
  modified_base 19: mod_base = OTHER; note = 2'O-methyl-adenosine
  modified_base 20: mod_base = OTHER; note = 2'O-methyl-adenosine
  modified_base 21: mod_base = cm
  modified_base 22: mod_base = OTHER; note = 2'O-methyl-adenosine
  modified_base 23: mod_base = gm
  modified_base 1^2: mod_base = OTHER; note = phosphorothioate linkage
  modified_base 2^3: mod_base = OTHER; note = phosphorothioate linkage
  modified_base 21^22: mod_base = OTHER; note = phosphorothioate linkage
  modified_base 22^23: mod_base = OTHER; note = phosphorothioate linkage
tcaggattaatctcatcaaacag

SEQ ID NO: 368 - RNA, 23 nt, synthetic construct
  source 1..23: mol_type = other RNA
  misc_feature 1..23: note = Antisense: ETXS644; corresponding to SEQ ID NO: 128
  modified_base 1: mod_base = um
  modified_base 2: mod_base = OTHER; note = 2' Fluoro-uridine
  modified_base 3: mod_base = gm
  modified_base 4: mod_base = gm
  modified_base 5: mod_base = um
  modified_base 6: mod_base = OTHER; note = 2' Fluoro-uridine
  modified_base 7: mod_base = um
  modified_base 8: mod_base = OTHER; note = 2' Fluoro-cytidine
  modified_base 9: mod_base = OTHER; note = 2'Fluoro-adenosine
  modified_base 10: mod_base = gm
  modified_base 11: mod_base = gm
  modified_base 12: mod_base = OTHER; note = 2'O-methyl-adenosine
  modified_base 13: mod_base = um
  modified_base 14: mod_base = OTHER; note = 2' Fluoro-uridine
  modified_base 15: mod_base = OTHER; note = 2'O-methyl-adenosine
  modified_base 16: mod_base = OTHER; note = 2'Fluoro-adenosine
  modified_base 17: mod_base = um
  modified_base 18: mod_base = cm
  modified_base 19: mod_base = um
  modified_base 20: mod_base = cm
  modified_base 21: mod_base = OTHER; note = 2'O-methyl-adenosine
  modified_base 22: mod_base = um
  modified_base 23: mod_base = cm
  modified_base 1^2: mod_base = OTHER; note = phosphorothioate linkage
  modified_base 2^3: mod_base = OTHER; note = phosphorothioate linkage
  modified_base 21^22: mod_base = OTHER; note = phosphorothioate linkage
  modified_base 22^23: mod_base = OTHER; note = phosphorothioate linkage
ttggtttcaggattaatctcatc

SEQ ID NO: 369 - RNA, 23 nt, synthetic construct
  source 1..23: mol_type = other RNA
  misc_feature 1..23: note = Antisense: ETXS646; corresponding to SEQ ID NO: 129
  modified_base 1: mod_base = gm
  modified_base 2: mod_base = OTHER; note = 2' Fluoro-uridine
  modified_base 3: mod_base = um
  modified_base 4: mod_base = um
  modified_base 5: mod_base = cm
  modified_base 6: mod_base = OTHER; note = 2'Fluoro-adenosine
  modified_base 7: mod_base = gm
  modified_base 8: mod_base = OTHER; note = 2' Fluoro-guanosine
  modified_base 9: mod_base = OTHER; note = 2'Fluoro-adenosine
  modified_base 10: mod_base = um
  modified_base 11: mod_base = um
  modified_base 12: mod_base = OTHER; note = 2'O-methyl-adenosine
  modified_base 13: mod_base = OTHER; note = 2'O-methyl-adenosine
  modified_base 14: mod_base = OTHER; note = 2' Fluoro-uridine
  modified_base 15: mod_base = cm
  modified_base 16: mod_base = OTHER; note = 2' Fluoro-uridine
  modified_base 17: mod_base = cm
  modified_base 18: mod_base = OTHER; note = 2'O-methyl-adenosine
  modified_base 19: mod_base = um
  modified_base 20: mod_base = cm
  modified_base 21: mod_base = OTHER; note = 2'O-methyl-adenosine
  modified_base 22: mod_base = OTHER; note = 2'O-methyl-adenosine
  modified_base 23: mod_base = OTHER; note = 2'O-methyl-adenosine
  modified_base 1^2: mod_base = OTHER; note = phosphorothioate linkage
  modified_base 2^3: mod_base = OTHER; note = phosphorothioate linkage
  modified_base 21^22: mod_base = OTHER; note = phosphorothioate linkage
  modified_base 22^23: mod_base = OTHER; note = phosphorothioate linkage
gtttcaggattaatctcatcaaa

SEQ ID NO: 370 - RNA, 23 nt, synthetic construct
  source 1..23: mol_type = other RNA
  misc_feature 1..23: note = Antisense: ETXS648; corresponding to SEQ ID NO: 130
  modified_base 1: mod_base = um
  modified_base 2: mod_base = OTHER; note = 2' Fluoro-guanosine
  modified_base 3: mod_base = gm
  modified_base 4: mod_base = um
  modified_base 5: mod_base = um
  modified_base 6: mod_base = OTHER; note = 2' Fluoro-uridine
  modified_base 7: mod_base = cm
  modified_base 8: mod_base = OTHER; note = 2'Fluoro-adenosine
  modified_base 9: mod_base = OTHER; note = 2' Fluoro-guanosine
  modified_base 10: mod_base = gm
  modified_base 11: mod_base = OTHER; note = 2'O-methyl-adenosine
  modified_base 12: mod_base = um
  modified_base 13: mod_base = um
  modified_base 14: mod_base = OTHER; note = 2'Fluoro-adenosine
  modified_base 15: mod_base = OTHER; note = 2'O-methyl-adenosine
  modified_base 16: mod_base = OTHER; note = 2' Fluoro-uridine
  modified_base 17: mod_base = cm
  modified_base 18: mod_base = um
  modified_base 19: mod_base = cm
  modified_base 20: mod_base = OTHER; note = 2'O-methyl-adenosine
  modified_base 21: mod_base = um
  modified_base 22: mod_base = cm
  modified_base 23: mod_base = OTHER; note = 2'O-methyl-adenosine
  modified_base 1^2: mod_base = OTHER; note = phosphorothioate linkage
  modified_base 2^3: mod_base = OTHER; note = phosphorothioate linkage
  modified_base 21^22: mod_base = OTHER; note = phosphorothioate linkage
  modified_base 22^23: mod_base = OTHER; note = phosphorothioate linkage
tggtttcaggattaatctcatca

SEQ ID NO: 371 - RNA, 23 nt, synthetic construct
  source 1..23: mol_type = other RNA
  misc_feature 1..23: note = Antisense: ETXS650; corresponding to SEQ ID NO: 131
  modified_base 1: mod_base = gm
  modified_base 2: mod_base = OTHER; note = 2' Fluoro-guanosine
  modified_base 3: mod_base = um
  modified_base 4: mod_base = um
  modified_base 5: mod_base = um
  modified_base 6: mod_base = OTHER; note = 2' Fluoro-cytidine
  modified_base 7: mod_base = OTHER; note = 2'O-methyl-adenosine
  modified_base 8: mod_base = OTHER; note = 2' Fluoro-guanosine
  modified_base 9: mod_base = OTHER; note = 2' Fluoro-guanosine
  modified_base 10: mod_base = OTHER; note = 2'O-methyl-adenosine
  modified_base 11: mod_base = um
  modified_base 12: mod_base = um
  modified_base 13: mod_base = OTHER; note = 2'O-methyl-adenosine
  modified_base 14: mod_base = OTHER; note = 2'Fluoro-adenosine
  modified_base 15: mod_base = um
  modified_base 16: mod_base = OTHER; note = 2' Fluoro-cytidine
  modified_base 17: mod_base = um
  modified_base 18: mod_base = cm
  modified_base 19: mod_base = OTHER; note = 2'O-methyl-adenosine
  modified_base 20: mod_base = um
  modified_base 21: mod_base = cm
  modified_base 22: mod_base = OTHER; note = 2'O-methyl-adenosine
  modified_base 23: mod_base = OTHER; note = 2'O-methyl-adenosine
  modified_base 1^2: mod_base = OTHER; note = phosphorothioate linkage
  modified_base 2^3: mod_base = OTHER; note = phosphorothioate linkage
  modified_base 21^22: mod_base = OTHER; note = phosphorothioate linkage
  modified_base 22^23: mod_base = OTHER; note = phosphorothioate linkage
ggtttcaggattaatctcatcaa

SEQ ID NO: 372 - RNA, 23 nt, synthetic construct
  source 1..23: mol_type = other RNA
  misc_feature 1..23: note = Antisense: ETXS652; corresponding to SEQ ID NO: 132
  modified_base 1: mod_base = OTHER; note = 2'O-methyl-adenosine
  modified_base 2: mod_base = OTHER; note = 2' Fluoro-guanosine
  modified_base 3: mod_base = gm
  modified_base 4: mod_base = OTHER; note = 2'O-methyl-adenosine
  modified_base 5: mod_base = um
  modified_base 6: mod_base = OTHER; note = 2' Fluoro-uridine
  modified_base 7: mod_base = OTHER; note = 2'O-methyl-adenosine
  modified_base 8: mod_base = OTHER; note = 2'Fluoro-adenosine
  modified_base 9: mod_base = OTHER; note = 2' Fluoro-uridine
  modified_base 10: mod_base = cm
  modified_base 11: mod_base = um
  modified_base 12: mod_base = cm
  modified_base 13: mod_base = OTHER; note = 2'O-methyl-adenosine
  modified_base 14: mod_base = OTHER; note = 2' Fluoro-uridine
  modified_base 15: mod_base = cm
  modified_base 16: mod_base = OTHER; note = 2'Fluoro-adenosine
  modified_base 17: mod_base = OTHER; note = 2'O-methyl-adenosine
  modified_base 18: mod_base = OTHER; note = 2'O-methyl-adenosine
  modified_base 19: mod_base = cm
  modified_base 20: mod_base = OTHER; note = 2'O-methyl-adenosine
  modified_base 21: mod_base = gm
  modified_base 22: mod_base = um
  modified_base 23: mod_base = um
  modified_base 1^2: mod_base = OTHER; note = phosphorothioate linkage
  modified_base 2^3: mod_base = OTHER; note = phosphorothioate linkage
  modified_base 21^22: mod_base = OTHER; note = phosphorothioate linkage
  modified_base 22^23: mod_base = OTHER; note = phosphorothioate linkage
aggattaatctcatcaaacagtt

SEQ ID NO: 373 - RNA, 23 nt, synthetic construct
  source 1..23: mol_type = other RNA
  misc_feature 1..23: note = Antisense: ETXS654; corresponding to SEQ ID NO: 133
  modified_base 1: mod_base = um
  modified_base 2: mod_base = OTHER; note = 2' Fluoro-cytidine
  modified_base 3: mod_base = cm
  modified_base 4: mod_base = um
  modified_base 5: mod_base = um
  modified_base 6: mod_base = OTHER; note = 2' Fluoro-guanosine
  modified_base 7: mod_base = um
  modified_base 8: mod_base = OTHER; note = 2' Fluoro-guanosine
  modified_base 9: mod_base = OTHER; note = 2' Fluoro-guanosine
  modified_base 10: mod_base = OTHER; note = 2'O-methyl-adenosine
  modified_base 11: mod_base = um
  modified_base 12: mod_base = gm
  modified_base 13: mod_base = OTHER; note = 2'O-methyl-adenosine
  modified_base 14: mod_base = OTHER; note = 2'Fluoro-adenosine
  modified_base 15: mod_base = gm
  modified_base 16: mod_base = OTHER; note = 2' Fluoro-guanosine
  modified_base 17: mod_base = cm
  modified_base 18: mod_base = OTHER; note = 2'O-methyl-adenosine
  modified_base 19: mod_base = OTHER; note = 2'O-methyl-adenosine
  modified_base 20: mod_base = OTHER; note = 2'O-methyl-adenosine
  modified_base 21: mod_base = OTHER; note = 2'O-methyl-adenosine
  modified_base 22: mod_base = cm
  modified_base 23: mod_base = um
  modified_base 1^2: mod_base = OTHER; note = phosphorothioate linkage
  modified_base 2^3: mod_base = OTHER; note = phosphorothioate linkage
  modified_base 21^22: mod_base = OTHER; note = phosphorothioate linkage
  modified_base 22^23: mod_base = OTHER; note = phosphorothioate linkage
tccttgtggatgaaggcaaaact

SEQ ID NO: 374 - RNA, 23 nt, synthetic construct
  source 1..23: mol_type = other RNA
  misc_feature 1..23: note = Antisense: ETXS656; corresponding to SEQ ID NO: 134
  modified_base 1: mod_base = gm
  modified_base 2: mod_base = OTHER; note = 2' Fluoro-uridine
  modified_base 3: mod_base = gm
  modified_base 4: mod_base = cm
  modified_base 5: mod_base = cm
  modified_base 6: mod_base = OTHER; note = 2' Fluoro-uridine
  modified_base 7: mod_base = cm
  modified_base 8: mod_base = OTHER; note = 2'Fluoro-adenosine
  modified_base 9: mod_base = OTHER; note = 2' Fluoro-uridine
  modified_base 10: mod_base = gm
  modified_base 11: mod_base = gm
  modified_base 12: mod_base = OTHER; note = 2'O-methyl-adenosine
  modified_base 13: mod_base = gm
  modified_base 14: mod_base = OTHER; note = 2'Fluoro-adenosine
  modified_base 15: mod_base = um
  modified_base 16: mod_base = OTHER; note = 2' Fluoro-cytidine
  modified_base 17: mod_base = um
  modified_base 18: mod_base = um
  modified_base 19: mod_base = um
  modified_base 20: mod_base = cm
  modified_base 21: mod_base = gm
  modified_base 22: mod_base = cm
  modified_base 23: mod_base = OTHER; note = 2'O-methyl-adenosine
  modified_base 1^2: mod_base = OTHER; note = phosphorothioate linkage
  modified_base 2^3: mod_base = OTHER; note = phosphorothioate linkage
  modified_base 21^22: mod_base = OTHER; note = phosphorothioate linkage
  modified_base 22^23: mod_base = OTHER; note = phosphorothioate linkage
gtgcctcatggagatctttcgca

SEQ ID NO: 375 - RNA, 23 nt, synthetic construct
  source 1..23: mol_type = other RNA
  misc_feature 1..23: note = Antisense: ETXS658; corresponding to SEQ ID NO: 135
  modified_base 1: mod_base = um
  modified_base 2: mod_base = OTHER; note = 2' Fluoro-cytidine
  modified_base 3: mod_base = um
  modified_base 4: mod_base = cm
  modified_base 5: mod_base = cm
  modified_base 6: mod_base = OTHER; note = 2'Fluoro-adenosine
  modified_base 7: mod_base = um
  modified_base 8: mod_base = OTHER; note = 2' Fluoro-guanosine
  modified_base 9: mod_base = OTHER; note = 2'Fluoro-adenosine
  modified_base 10: mod_base = gm
  modified_base 11: mod_base = gm
  modified_base 12: mod_base = OTHER; note = 2'O-methyl-adenosine
  modified_base 13: mod_base = cm
  modified_base 14: mod_base = OTHER; note = 2' Fluoro-cytidine
  modified_base 15: mod_base = OTHER; note = 2'O-methyl-adenosine
  modified_base 16: mod_base = OTHER; note = 2' Fluoro-cytidine
  modified_base 17: mod_base = cm
  modified_base 18: mod_base = OTHER; note = 2'O-methyl-adenosine
  modified_base 19: mod_base = gm
  modified_base 20: mod_base = cm
  modified_base 21: mod_base = OTHER; note = 2'O-methyl-adenosine
  modified_base 22: mod_base = um
  modified_base 23: mod_base = gm
  modified_base 1^2: mod_base = OTHER; note = phosphorothioate linkage
  modified_base 2^3: mod_base = OTHER; note = phosphorothioate linkage
  modified_base 21^22: mod_base = OTHER; note = phosphorothioate linkage
  modified_base 22^23: mod_base = OTHER; note = phosphorothioate linkage
tctccatgaggaccaccagcatg

SEQ ID NO: 376 - RNA, 23 nt, synthetic construct
  source 1..23: mol_type = other RNA
  misc_feature 1..23: note = Antisense: ETXS660; corresponding to SEQ ID NO: 136
  modified_base 1: mod_base = cm
  modified_base 2: mod_base = OTHER; note = 2'Fluoro-adenosine
  modified_base 3: mod_base = OTHER; note = 2'O-methyl-adenosine
  modified_base 4: mod_base = OTHER; note = 2'O-methyl-adenosine
  modified_base 5: mod_base = OTHER; note = 2'O-methyl-adenosine
  modified_base 6: mod_base = OTHER; note = 2' Fluoro-uridine
  modified_base 7: mod_base = cm
  modified_base 8: mod_base = OTHER; note = 2' Fluoro-cytidine
  modified_base 9: mod_base = OTHER; note = 2' Fluoro-uridine
  modified_base 10: mod_base = um
  modified_base 11: mod_base = gm
  modified_base 12: mod_base = um
  modified_base 13: mod_base = gm
  modified_base 14: mod_base = OTHER; note = 2' Fluoro-guanosine
  modified_base 15: mod_base = OTHER; note = 2'O-methyl-adenosine
  modified_base 16: mod_base = OTHER; note = 2' Fluoro-uridine
  modified_base 17: mod_base = gm
  modified_base 18: mod_base = OTHER; note = 2'O-methyl-adenosine
  modified_base 19: mod_base = OTHER; note = 2'O-methyl-adenosine
  modified_base 20: mod_base = gm
  modified_base 21: mod_base = gm
  modified_base 22: mod_base = cm
  modified_base 23: mod_base = OTHER; note = 2'O-methyl-adenosine
  modified_base 1^2: mod_base = OTHER; note = phosphorothioate linkage
  modified_base 2^3: mod_base = OTHER; note = phosphorothioate linkage
  modified_base 21^22: mod_base = OTHER; note = phosphorothioate linkage
  modified_base 22^23: mod_base = OTHER; note = phosphorothioate linkage
caaaatccttgtggatgaaggca

SEQ ID NO: 377 - RNA, 23 nt, synthetic construct
  source 1..23: mol_type = other RNA
  misc_feature 1..23: note = Antisense: ETXS662; corresponding to SEQ ID NO: 137
  modified_base 1: mod_base = cm
  modified_base 2: mod_base = OTHER; note = 2' Fluoro-guanosine
  modified_base 3: mod_base = um
  modified_base 4: mod_base = gm
  modified_base 5: mod_base = cm
  modified_base 6: mod_base = OTHER; note = 2' Fluoro-cytidine
  modified_base 7: mod_base = um
  modified_base 8: mod_base = OTHER; note = 2' Fluoro-cytidine
  modified_base 9: mod_base = OTHER; note = 2'Fluoro-adenosine
  modified_base 10: mod_base = um
  modified_base 11: mod_base = gm
  modified_base 12: mod_base = gm
  modified_base 13: mod_base = OTHER; note = 2'O-methyl-adenosine
  modified_base 14: mod_base = OTHER; note = 2' Fluoro-guanosine
  modified_base 15: mod_base = OTHER; note = 2'O-methyl-adenosine
  modified_base 16: mod_base = OTHER; note = 2' Fluoro-uridine
  modified_base 17: mod_base = cm
  modified_base 18: mod_base = um
  modified_base 19: mod_base = um
  modified_base 20: mod_base = um
  modified_base 21: mod_base = cm
  modified_base 22: mod_base = gm
  modified_base 23: mod_base = cm
  modified_base 1^2: mod_base = OTHER; note = phosphorothioate linkage
  modified_base 2^3: mod_base = OTHER; note = phosphorothioate linkage
  modified_base 21^22: mod_base = OTHER; note = phosphorothioate linkage
  modified_base 22^23: mod_base = OTHER; note = phosphorothioate linkage
cgtgcctcatggagatctttcgc

SEQ ID NO: 378 - RNA, 23 nt, synthetic construct
  source 1..23: mol_type = other RNA
  misc_feature 1..23: note = Antisense: ETXS664; corresponding to SEQ ID NO: 138
  modified_base 1: mod_base = OTHER; note = 2'O-methyl-adenosine
  modified_base 2: mod_base = OTHER; note = 2' Fluoro-uridine
  modified_base 3: mod_base = cm
  modified_base 4: mod_base = OTHER; note = 2'O-methyl-adenosine
  modified_base 5: mod_base = OTHER; note = 2'O-methyl-adenosine
  modified_base 6: mod_base = OTHER; note = 2'Fluoro-adenosine
  modified_base 7: mod_base = OTHER; note = 2'O-methyl-adenosine
  modified_base 8: mod_base = OTHER; note = 2' Fluoro-uridine
  modified_base 9: mod_base = OTHER; note = 2' Fluoro-cytidine
  modified_base 10: mod_base = cm
  modified_base 11: mod_base = um
  modified_base 12: mod_base = um
  modified_base 13: mod_base = gm
  modified_base 14: mod_base = OTHER; note = 2' Fluoro-uridine
  modified_base 15: mod_base = gm
  modified_base 16: mod_base = OTHER; note = 2' Fluoro-guanosine
  modified_base 17: mod_base = OTHER; note = 2'O-methyl-adenosine
  modified_base 18: mod_base = um
  modified_base 19: mod_base = gm
  modified_base 20: mod_base = OTHER; note = 2'O-methyl-adenosine
  modified_base 21: mod_base = OTHER; note = 2'O-methyl-adenosine
  modified_base 22: mod_base = gm
  modified_base 23: mod_base = gm
  modified_base 1^2: mod_base = OTHER; note = phosphorothioate linkage
  modified_base 2^3: mod_base = OTHER; note = phosphorothioate linkage
  modified_base 21^22: mod_base = OTHER; note = phosphorothioate linkage
  modified_base 22^23: mod_base = OTHER; note = phosphorothioate linkage
atcaaaatccttgtggatgaagg

SEQ ID NO: 379 - RNA, 23 nt, synthetic construct
  source 1..23: mol_type = other RNA
  misc_feature 1..23: note = Antisense: ETXS666; corresponding to SEQ ID NO: 139
  modified_base 1: mod_base = um
  modified_base 2: mod_base = OTHER; note = 2' Fluoro-uridine
  modified_base 3: mod_base = cm
  modified_base 4: mod_base = OTHER; note = 2'O-methyl-adenosine
  modified_base 5: mod_base = gm
  modified_base 6: mod_base = OTHER; note = 2' Fluoro-guanosine
  modified_base 7: mod_base = OTHER; note = 2'O-methyl-adenosine
  modified_base 8: mod_base = OTHER; note = 2' Fluoro-uridine
  modified_base 9: mod_base = OTHER; note = 2' Fluoro-uridine
  modified_base 10: mod_base = OTHER; note = 2'O-methyl-adenosine
  modified_base 11: mod_base = OTHER; note = 2'O-methyl-adenosine
  modified_base 12: mod_base = um
  modified_base 13: mod_base = cm
  modified_base 14: mod_base = OTHER; note = 2' Fluoro-uridine
  modified_base 15: mod_base = cm
  modified_base 16: mod_base = OTHER; note = 2'Fluoro-adenosine
  modified_base 17: mod_base = um
  modified_base 18: mod_base = cm
  modified_base 19: mod_base = OTHER; note = 2'O-methyl-adenosine
  modified_base 20: mod_base = OTHER; note = 2'O-methyl-adenosine
  modified_base 21: mod_base = OTHER; note = 2'O-methyl-adenosine
  modified_base 22: mod_base = cm
  modified_base 23: mod_base = OTHER; note = 2'O-methyl-adenosine
  modified_base 1^2: mod_base = OTHER; note = phosphorothioate linkage
  modified_base 2^3: mod_base = OTHER; note = phosphorothioate linkage
  modified_base 21^22: mod_base = OTHER; note = phosphorothioate linkage
  modified_base 22^23: mod_base = OTHER; note = phosphorothioate linkage
ttcaggattaatctcatcaaaca

SEQ ID NO: 380 - RNA, 23 nt, synthetic construct
  source 1..23: mol_type = other RNA
  misc_feature 1..23: note = Antisense: ETXS668; corresponding to SEQ ID NO: 140
  modified_base 1: mod_base = OTHER; note = 2'O-methyl-adenosine
  modified_base 2: mod_base = OTHER; note = 2'Fluoro-adenosine
  modified_base 3: mod_base = um
  modified_base 4: mod_base = cm
  modified_base 5: mod_base = cm
  modified_base 6: mod_base = OTHER; note = 2' Fluoro-uridine
  modified_base 7: mod_base = um
  modified_base 8: mod_base = OTHER; note = 2' Fluoro-guanosine
  modified_base 9: mod_base = OTHER; note = 2' Fluoro-uridine
  modified_base 10: mod_base = gm
  modified_base 11: mod_base = gm
  modified_base 12: mod_base = OTHER; note = 2'O-methyl-adenosine
  modified_base 13: mod_base = um
  modified_base 14: mod_base = OTHER; note = 2' Fluoro-guanosine
  modified_base 15: mod_base = OTHER; note = 2'O-methyl-adenosine
  modified_base 16: mod_base = OTHER; note = 2'Fluoro-adenosine
  modified_base 17: mod_base = gm
  modified_base 18: mod_base = gm
  modified_base 19: mod_base = cm
  modified_base 20: mod_base = OTHER; note = 2'O-methyl-adenosine
  modified_base 21: mod_base = OTHER; note = 2'O-methyl-adenosine
  modified_base 22: mod_base = OTHER; note = 2'O-methyl-adenosine
  modified_base 23: mod_base = OTHER; note = 2'O-methyl-adenosine
  modified_base 1^2: mod_base = OTHER; note = phosphorothioate linkage
  modified_base 2^3: mod_base = OTHER; note = phosphorothioate linkage
  modified_base 21^22: mod_base = OTHER; note = phosphorothioate linkage
  modified_base 22^23: mod_base = OTHER; note = phosphorothioate linkage
aatccttgtggatgaaggcaaaa

SEQ ID NO: 381 - RNA, 23 nt, synthetic construct
  source 1..23: mol_type = other RNA
  misc_feature 1..23: note = Antisense: ETXS670; corresponding to SEQ ID NO: 141
  modified_base 1: mod_base = cm
  modified_base 2: mod_base = OTHER; note = 2' Fluoro-cytidine
  modified_base 3: mod_base = OTHER; note = 2'O-methyl-adenosine
  modified_base 4: mod_base = um
  modified_base 5: mod_base = cm
  modified_base 6: mod_base = OTHER; note = 2' Fluoro-guanosine
  modified_base 7: mod_base = um
  modified_base 8: mod_base = OTHER; note = 2' Fluoro-guanosine
  modified_base 9: mod_base = OTHER; note = 2' Fluoro-cytidine
  modified_base 10: mod_base = cm
  modified_base 11: mod_base = um
  modified_base 12: mod_base = cm
  modified_base 13: mod_base = OTHER; note = 2'O-methyl-adenosine
  modified_base 14: mod_base = OTHER; note = 2' Fluoro-uridine
  modified_base 15: mod_base = gm
  modified_base 16: mod_base = OTHER; note = 2' Fluoro-guanosine
  modified_base 17: mod_base = OTHER; note = 2'O-methyl-adenosine
  modified_base 18: mod_base = gm
  modified_base 19: mod_base = OTHER; note = 2'O-methyl-adenosine
  modified_base 20: mod_base = um
  modified_base 21: mod_base = cm
  modified_base 22: mod_base = um
  modified_base 23: mod_base = um
  modified_base 1^2: mod_base = OTHER; note = phosphorothioate linkage
  modified_base 2^3: mod_base = OTHER; note = phosphorothioate linkage
  modified_base 21^22: mod_base = OTHER; note = phosphorothioate linkage
  modified_base 22^23: mod_base = OTHER; note = phosphorothioate linkage
ccatcgtgcctcatggagatctt

SEQ ID NO: 382 - RNA, 23 nt, synthetic construct
  source 1..23: mol_type = other RNA
  misc_feature 1..23: note = Antisense: ETXS672; corresponding to SEQ ID NO: 142
  modified_base 1: mod_base = um
  modified_base 2: mod_base = OTHER; note = 2' Fluoro-cytidine
  modified_base 3: mod_base = cm
  modified_base 4: mod_base = OTHER; note = 2'O-methyl-adenosine
  modified_base 5: mod_base = um
  modified_base 6: mod_base = OTHER; note = 2' Fluoro-guanosine
  modified_base 7: mod_base = OTHER; note = 2'O-methyl-adenosine
  modified_base 8: mod_base = OTHER; note = 2' Fluoro-guanosine
  modified_base 9: mod_base = OTHER; note = 2' Fluoro-guanosine
  modified_base 10: mod_base = OTHER; note = 2'O-methyl-adenosine
  modified_base 11: mod_base = cm
  modified_base 12: mod_base = cm
  modified_base 13: mod_base = OTHER; note = 2'O-methyl-adenosine
  modified_base 14: mod_base = OTHER; note = 2' Fluoro-cytidine
  modified_base 15: mod_base = cm
  modified_base 16: mod_base = OTHER; note = 2'Fluoro-adenosine
  modified_base 17: mod_base = gm
  modified_base 18: mod_base = cm
  modified_base 19: mod_base = OTHER; note = 2'O-methyl-adenosine
  modified_base 20: mod_base = um
  modified_base 21: mod_base = gm
  modified_base 22: mod_base = gm
  modified_base 23: mod_base = um
  modified_base 1^2: mod_base = OTHER; note = phosphorothioate linkage
  modified_base 2^3: mod_base = OTHER; note = phosphorothioate linkage
  modified_base 21^22: mod_base = OTHER; note = phosphorothioate linkage
  modified_base 22^23: mod_base = OTHER; note = phosphorothioate linkage
tccatgaggaccaccagcatggt

SEQ ID NO: 383 - RNA, 23 nt, synthetic construct
  source 1..23: mol_type = other RNA
  misc_feature 1..23: note = Antisense: ETXS674; corresponding to SEQ ID NO: 143
  modified_base 1: mod_base = OTHER; note = 2'O-methyl-adenosine
  modified_base 2: mod_base = OTHER; note = 2' Fluoro-uridine
  modified_base 3: mod_base = cm
  modified_base 4: mod_base = cm
  modified_base 5: mod_base = um
  modified_base 6: mod_base = OTHER; note = 2' Fluoro-uridine
  modified_base 7: mod_base = gm
  modified_base 8: mod_base = OTHER; note = 2' Fluoro-uridine
  modified_base 9: mod_base = OTHER; note = 2' Fluoro-guanosine
  modified_base 10: mod_base = gm
  modified_base 11: mod_base = OTHER; note = 2'O-methyl-adenosine
  modified_base 12: mod_base = um
  modified_base 13: mod_base = gm
  modified_base 14: mod_base = OTHER; note = 2'Fluoro-adenosine
  modified_base 15: mod_base = OTHER; note = 2'O-methyl-adenosine
  modified_base 16: mod_base = OTHER; note = 2' Fluoro-guanosine
  modified_base 17: mod_base = gm
  modified_base 18: mod_base = cm
  modified_base 19: mod_base = OTHER; note = 2'O-methyl-adenosine
  modified_base 20: mod_base = OTHER; note = 2'O-methyl-adenosine
  modified_base 21: mod_base = OTHER; note = 2'O-methyl-adenosine
  modified_base 22: mod_base = OTHER; note = 2'O-methyl-adenosine
  modified_base 23: mod_base = cm
  modified_base 1^2: mod_base = OTHER; note = phosphorothioate linkage
  modified_base 2^3: mod_base = OTHER; note = phosphorothioate linkage
  modified_base 21^22: mod_base = OTHER; note = phosphorothioate linkage
  modified_base 22^23: mod_base = OTHER; note = phosphorothioate linkage
atccttgtggatgaaggcaaaac

SEQ ID NO: 384 - RNA, 23 nt, synthetic construct
  source 1..23: mol_type = other RNA
  misc_feature 1..23: note = Antisense: ETXS676; corresponding to SEQ ID NO: 144
  modified_base 1: mod_base = OTHER; note = 2'O-methyl-adenosine
  modified_base 2: mod_base = OTHER; note = 2'Fluoro-adenosine
  modified_base 3: mod_base = OTHER; note = 2'O-methyl-adenosine
  modified_base 4: mod_base = OTHER; note = 2'O-methyl-adenosine
  modified_base 5: mod_base = um
  modified_base 6: mod_base = OTHER; note = 2' Fluoro-cytidine
  modified_base 7: mod_base = cm
  modified_base 8: mod_base = OTHER; note = 2' Fluoro-uridine
  modified_base 9: mod_base = OTHER; note = 2' Fluoro-uridine
  modified_base 10: mod_base = gm
  modified_base 11: mod_base = um
  modified_base 12: mod_base = gm
  modified_base 13: mod_base = gm
  modified_base 14: mod_base = OTHER; note = 2'Fluoro-adenosine
  modified_base 15: mod_base = um
  modified_base 16: mod_base = OTHER; note = 2' Fluoro-guanosine
  modified_base 17: mod_base = OTHER; note = 2'O-methyl-adenosine
  modified_base 18: mod_base = OTHER; note = 2'O-methyl-adenosine
  modified_base 19: mod_base = gm
  modified_base 20: mod_base = gm
  modified_base 21: mod_base = cm
  modified_base 22: mod_base = OTHER; note = 2'O-methyl-adenosine
  modified_base 23: mod_base = OTHER; note = 2'O-methyl-adenosine
  modified_base 1^2: mod_base = OTHER; note = phosphorothioate linkage
  modified_base 2^3: mod_base = OTHER; note = phosphorothioate linkage
  modified_base 21^22: mod_base = OTHER; note = phosphorothioate linkage
  modified_base 22^23: mod_base = OTHER; note = phosphorothioate linkage
aaaatccttgtggatgaaggcaa

SEQ ID NO: 385 - RNA, 23 nt, synthetic construct
  source 1..23: mol_type = other RNA
  misc_feature 1..23: note = Antisense: ETXS678; corresponding to SEQ ID NO: 145
  modified_base 1: mod_base = cm
  modified_base 2: mod_base = OTHER; note = 2'Fluoro-adenosine
  modified_base 3: mod_base = um
  modified_base 4: mod_base = gm
  modified_base 5: mod_base = gm
  modified_base 6: mod_base = OTHER; note = 2' Fluoro-uridine
  modified_base 7: mod_base = gm
  modified_base 8: mod_base = OTHER; note = 2' Fluoro-guanosine
  modified_base 9: mod_base = OTHER; note = 2' Fluoro-cytidine
  modified_base 10: mod_base = OTHER; note = 2'O-methyl-adenosine
  modified_base 11: mod_base = um
  modified_base 12: mod_base = um
  modified_base 13: mod_base = um
  modified_base 14: mod_base = OTHER; note = 2' Fluoro-cytidine
  modified_base 15: mod_base = cm
  modified_base 16: mod_base = OTHER; note = 2' Fluoro-uridine
  modified_base 17: mod_base = um
  modified_base 18: mod_base = gm
  modified_base 19: mod_base = gm
  modified_base 20: mod_base = um
  modified_base 21: mod_base = OTHER; note = 2'O-methyl-adenosine
  modified_base 22: mod_base = gm
  modified_base 23: mod_base = gm
  modified_base 1^2: mod_base = OTHER; note = phosphorothioate linkage
  modified_base 2^3: mod_base = OTHER; note = phosphorothioate linkage
  modified_base 21^22: mod_base = OTHER; note = phosphorothioate linkage
  modified_base 22^23: mod_base = OTHER; note = phosphorothioate linkage
catggtggcatttccttggtagg

SEQ ID NO: 386 - RNA, 23 nt, synthetic construct
  source 1..23: mol_type = other RNA
  misc_feature 1..23: note = Antisense: ETXS680; corresponding to SEQ ID NO: 146
  modified_base 1: mod_base = um
  modified_base 2: mod_base = OTHER; note = 2' Fluoro-uridine
  modified_base 3: mod_base = um
  modified_base 4: mod_base = cm
  modified_base 5: mod_base = OTHER; note = 2'O-methyl-adenosine
  modified_base 6: mod_base = OTHER; note = 2' Fluoro-guanosine
  modified_base 7: mod_base = gm
  modified_base 8: mod_base = OTHER; note = 2'Fluoro-adenosine
  modified_base 9: mod_base = OTHER; note = 2' Fluoro-uridine
  modified_base 10: mod_base = um
  modified_base 11: mod_base = OTHER; note = 2'O-methyl-adenosine
  modified_base 12: mod_base = OTHER; note = 2'O-methyl-adenosine
  modified_base 13: mod_base = um
  modified_base 14: mod_base = OTHER; note = 2' Fluoro-cytidine
  modified_base 15: mod_base = um
  modified_base 16: mod_base = OTHER; note = 2' Fluoro-cytidine
  modified_base 17: mod_base = OTHER; note = 2'O-methyl-adenosine
  modified_base 18: mod_base = um
  modified_base 19: mod_base = cm
  modified_base 20: mod_base = OTHER; note = 2'O-methyl-adenosine
  modified_base 21: mod_base = OTHER; note = 2'O-methyl-adenosine
  modified_base 22: mod_base = OTHER; note = 2'O-methyl-adenosine
  modified_base 23: mod_base = cm
  modified_base 1^2: mod_base = OTHER; note = phosphorothioate linkage
  modified_base 2^3: mod_base = OTHER; note = phosphorothioate linkage
  modified_base 21^22: mod_base = OTHER; note = phosphorothioate linkage
  modified_base 22^23: mod_base = OTHER; note = phosphorothioate linkage
tttcaggattaatctcatcaaac

SEQ ID NO: 387 - RNA, 23 nt, synthetic construct
  source 1..23: mol_type = other RNA
  misc_feature 1..23: note = Antisense: ETXS682; corresponding to SEQ ID NO: 147
  modified_base 1: mod_base = um
  modified_base 2: mod_base = OTHER; note = 2' Fluoro-cytidine
  modified_base 3: mod_base = OTHER; note = 2'O-methyl-adenosine
  modified_base 4: mod_base = OTHER; note = 2'O-methyl-adenosine
  modified_base 5: mod_base = OTHER; note = 2'O-methyl-adenosine
  modified_base 6: mod_base = OTHER; note = 2'Fluoro-adenosine
  modified_base 7: mod_base = um
  modified_base 8: mod_base = OTHER; note = 2' Fluoro-cytidine
  modified_base 9: mod_base = OTHER; note = 2' Fluoro-cytidine
  modified_base 10: mod_base = um
  modified_base 11: mod_base = um
  modified_base 12: mod_base = gm
  modified_base 13: mod_base = um
  modified_base 14: mod_base = OTHER; note = 2' Fluoro-guanosine
  modified_base 15: mod_base = gm
  modified_base 16: mod_base = OTHER; note = 2'Fluoro-adenosine
  modified_base 17: mod_base = um
  modified_base 18: mod_base = gm
  modified_base 19: mod_base = OTHER; note = 2'O-methyl-adenosine
  modified_base 20: mod_base = OTHER; note = 2'O-methyl-adenosine
  modified_base 21: mod_base = gm
  modified_base 22: mod_base = gm
  modified_base 23: mod_base = cm
  modified_base 1^2: mod_base = OTHER; note = phosphorothioate linkage
  modified_base 2^3: mod_base = OTHER; note = phosphorothioate linkage
  modified_base 21^22: mod_base = OTHER; note = phosphorothioate linkage
  modified_base 22^23: mod_base = OTHER; note = phosphorothioate linkage
tcaaaatccttgtggatgaaggc

SEQ ID NO: 388 - RNA, 23 nt, synthetic construct
  source 1..23: mol_type = other RNA
  misc_feature 1..23: note = Antisense: ETXS684; corresponding to SEQ ID NO: 148
  modified_base 1: mod_base = um
  modified_base 2: mod_base = OTHER; note = 2' Fluoro-cytidine
  modified_base 3: mod_base = gm
  modified_base 4: mod_base = um
  modified_base 5: mod_base = gm
  modified_base 6: mod_base = OTHER; note = 2' Fluoro-cytidine
  modified_base 7: mod_base = cm
  modified_base 8: mod_base = OTHER; note = 2' Fluoro-uridine
  modified_base 9: mod_base = OTHER; note = 2' Fluoro-cytidine
  modified_base 10: mod_base = OTHER; note = 2'O-methyl-adenosine
  modified_base 11: mod_base = um
  modified_base 12: mod_base = gm
  modified_base 13: mod_base = gm
  modified_base 14: mod_base = OTHER; note = 2'Fluoro-adenosine
  modified_base 15: mod_base = gm
  modified_base 16: mod_base = OTHER; note = 2'Fluoro-adenosine
  modified_base 17: mod_base = um
  modified_base 18: mod_base = cm
  modified_base 19: mod_base = um
  modified_base 20: mod_base = um
  modified_base 21: mod_base = um
  modified_base 22: mod_base = cm
  modified_base 23: mod_base = gm
  modified_base 1^2: mod_base = OTHER; note = phosphorothioate linkage
  modified_base 2^3: mod_base = OTHER; note = phosphorothioate linkage
  modified_base 21^22: mod_base = OTHER; note = phosphorothioate linkage
  modified_base 22^23: mod_base = OTHER; note = phosphorothioate linkage
tcgtgcctcatggagatctttcg

SEQ ID NO: 389 - RNA, 23 nt, synthetic construct
  source 1..23: mol_type = other RNA
  misc_feature 1..23: note = Antisense: ETXS686; corresponding to SEQ ID NO: 149
  modified_base 1: mod_base = cm
  modified_base 2: mod_base = OTHER; note = 2'Fluoro-adenosine
  modified_base 3: mod_base = gm
  modified_base 4: mod_base = gm
  modified_base 5: mod_base = OTHER; note = 2'O-methyl-adenosine
  modified_base 6: mod_base = OTHER; note = 2' Fluoro-uridine
  modified_base 7: mod_base = um
  modified_base 8: mod_base = OTHER; note = 2'Fluoro-adenosine
  modified_base 9: mod_base = OTHER; note = 2'Fluoro-adenosine
  modified_base 10: mod_base = um
  modified_base 11: mod_base = cm
  modified_base 12: mod_base = um
  modified_base 13: mod_base = cm
  modified_base 14: mod_base = OTHER; note = 2'Fluoro-adenosine
  modified_base 15: mod_base = um
  modified_base 16: mod_base = OTHER; note = 2' Fluoro-cytidine
  modified_base 17: mod_base = OTHER; note = 2'O-methyl-adenosine
  modified_base 18: mod_base = OTHER; note = 2'O-methyl-adenosine
  modified_base 19: mod_base = OTHER; note = 2'O-methyl-adenosine
  modified_base 20: mod_base = cm
  modified_base 21: mod_base = OTHER; note = 2'O-methyl-adenosine
  modified_base 22: mod_base = gm
  modified_base 23: mod_base = um
  modified_base 1^2: mod_base = OTHER; note = phosphorothioate linkage
  modified_base 2^3: mod_base = OTHER; note = phosphorothioate linkage
  modified_base 21^22: mod_base = OTHER; note = phosphorothioate linkage
  modified_base 22^23: mod_base = OTHER; note = phosphorothioate linkage
caggattaatctcatcaaacagt

SEQ ID NO: 390 - RNA, 23 nt, synthetic construct
  source 1..23: mol_type = other RNA
  misc_feature 1..23: note = Antisense: ETXS688; corresponding to SEQ ID NO: 150
  modified_base 1: mod_base = cm
  modified_base 2: mod_base = OTHER; note = 2' Fluoro-uridine
  modified_base 3: mod_base = cm
  modified_base 4: mod_base = cm
  modified_base 5: mod_base = OTHER; note = 2'O-methyl-adenosine
  modified_base 6: mod_base = OTHER; note = 2' Fluoro-uridine
  modified_base 7: mod_base = gm
  modified_base 8: mod_base = OTHER; note = 2'Fluoro-adenosine
  modified_base 9: mod_base = OTHER; note = 2' Fluoro-guanosine
  modified_base 10: mod_base = gm
  modified_base 11: mod_base = OTHER; note = 2'O-methyl-adenosine
  modified_base 12: mod_base = cm
  modified_base 13: mod_base = cm
  modified_base 14: mod_base = OTHER; note = 2'Fluoro-adenosine
  modified_base 15: mod_base = cm
  modified_base 16: mod_base = OTHER; note = 2' Fluoro-cytidine
  modified_base 17: mod_base = OTHER; note = 2'O-methyl-adenosine
  modified_base 18: mod_base = gm
  modified_base 19: mod_base = cm
  modified_base 20: mod_base = OTHER; note = 2'O-methyl-adenosine
  modified_base 21: mod_base = um
  modified_base 22: mod_base = gm
  modified_base 23: mod_base = gm
  modified_base 1^2: mod_base = OTHER; note = phosphorothioate linkage
  modified_base 2^3: mod_base = OTHER; note = phosphorothioate linkage
  modified_base 21^22: mod_base = OTHER; note = phosphorothioate linkage
  modified_base 22^23: mod_base = OTHER; note = phosphorothioate linkage
ctccatgaggaccaccagcatgg

SEQ ID NO: 391 - RNA, 23 nt, synthetic construct
  source 1..23: mol_type = other RNA
  misc_feature 1..23: note = Antisense: ETXS690; corresponding to SEQ ID NO: 151
  modified_base 1: mod_base = cm
  modified_base 2: mod_base = OTHER; note = 2' Fluoro-cytidine
  modified_base 3: mod_base = um
  modified_base 4: mod_base = um
  modified_base 5: mod_base = gm
  modified_base 6: mod_base = OTHER; note = 2' Fluoro-uridine
  modified_base 7: mod_base = gm
  modified_base 8: mod_base = OTHER; note = 2' Fluoro-guanosine
  modified_base 9: mod_base = OTHER; note = 2'Fluoro-adenosine
  modified_base 10: mod_base = um
  modified_base 11: mod_base = gm
  modified_base 12: mod_base = OTHER; note = 2'O-methyl-adenosine
  modified_base 13: mod_base = OTHER; note = 2'O-methyl-adenosine
  modified_base 14: mod_base = OTHER; note = 2' Fluoro-guanosine
  modified_base 15: mod_base = gm
  modified_base 16: mod_base = OTHER; note = 2' Fluoro-cytidine
  modified_base 17: mod_base = OTHER; note = 2'O-methyl-adenosine
  modified_base 18: mod_base = OTHER; note = 2'O-methyl-adenosine
  modified_base 19: mod_base = OTHER; note = 2'O-methyl-adenosine
  modified_base 20: mod_base = OTHER; note = 2'O-methyl-adenosine
  modified_base 21: mod_base = cm
  modified_base 22: mod_base = um
  modified_base 23: mod_base = cm
  modified_base 1^2: mod_base = OTHER; note = phosphorothioate linkage
  modified_base 2^3: mod_base = OTHER; note = phosphorothioate linkage
  modified_base 21^22: mod_base = OTHER; note = phosphorothioate linkage
  modified_base 22^23: mod_base = OTHER; note = phosphorothioate linkage
ccttgtggatgaaggcaaaactc

SEQ ID NO: 392 - RNA, 23 nt, synthetic construct
  source 1..23: mol_type = other RNA
  misc_feature 1..23: note = Antisense: ETXS692; corresponding to SEQ ID NO: 152
  modified_base 1: mod_base = um
  modified_base 2: mod_base = OTHER; note = 2' Fluoro-guanosine
  modified_base 3: mod_base = OTHER; note = 2'O-methyl-adenosine
  modified_base 4: mod_base = gm
  modified_base 5: mod_base = gm
  modified_base 6: mod_base = OTHER; note = 2'Fluoro-adenosine
  modified_base 7: mod_base = cm
  modified_base 8: mod_base = OTHER; note = 2' Fluoro-cytidine
  modified_base 9: mod_base = OTHER; note = 2'Fluoro-adenosine
  modified_base 10: mod_base = cm
  modified_base 11: mod_base = cm
  modified_base 12: mod_base = OTHER; note = 2'O-methyl-adenosine
  modified_base 13: mod_base = gm
  modified_base 14: mod_base = OTHER; note = 2' Fluoro-cytidine
  modified_base 15: mod_base = OTHER; note = 2'O-methyl-adenosine
  modified_base 16: mod_base = OTHER; note = 2' Fluoro-uridine
  modified_base 17: mod_base = gm
  modified_base 18: mod_base = gm
  modified_base 19: mod_base = um
  modified_base 20: mod_base = gm
  modified_base 21: mod_base = gm
  modified_base 22: mod_base = cm
  modified_base 23: mod_base = OTHER; note = 2'O-methyl-adenosine
  modified_base 1^2: mod_base = OTHER; note = phosphorothioate linkage
  modified_base 2^3: mod_base = OTHER; note = phosphorothioate linkage
  modified_base 21^22: mod_base = OTHER; note = phosphorothioate linkage
  modified_base 22^23: mod_base = OTHER; note = phosphorothioate linkage
tgaggaccaccagcatggtggca

SEQ ID NO: 393 - RNA, 23 nt, synthetic construct
  source 1..23: mol_type = other RNA
  misc_feature 1..23: note = Antisense: ETXS694; corresponding to SEQ ID NO: 153
  modified_base 1: mod_base = OTHER; note = 2'O-methyl-adenosine
  modified_base 2: mod_base = OTHER; note = 2' Fluoro-uridine
  modified_base 3: mod_base = gm
  modified_base 4: mod_base = OTHER; note = 2'O-methyl-adenosine
  modified_base 5: mod_base = gm
  modified_base 6: mod_base = OTHER; note = 2' Fluoro-guanosine
  modified_base 7: mod_base = OTHER; note = 2'O-methyl-adenosine
  modified_base 8: mod_base = OTHER; note = 2' Fluoro-cytidine
  modified_base 9: mod_base = OTHER; note = 2' Fluoro-cytidine
  modified_base 10: mod_base = OTHER; note = 2'O-methyl-adenosine
  modified_base 11: mod_base = cm
  modified_base 12: mod_base = cm
  modified_base 13: mod_base = OTHER; note = 2'O-methyl-adenosine
  modified_base 14: mod_base = OTHER; note = 2' Fluoro-guanosine
  modified_base 15: mod_base = cm
  modified_base 16: mod_base = OTHER; note = 2'Fluoro-adenosine
  modified_base 17: mod_base = um
  modified_base 18: mod_base = gm
  modified_base 19: mod_base = gm
  modified_base 20: mod_base = um
  modified_base 21: mod_base = gm
  modified_base 22: mod_base = gm
  modified_base 23: mod_base = cm
  modified_base 1^2: mod_base = OTHER; note = phosphorothioate linkage
  modified_base 2^3: mod_base = OTHER; note = phosphorothioate linkage
  modified_base 21^22: mod_base = OTHER; note = phosphorothioate linkage
  modified_base 22^23: mod_base = OTHER; note = phosphorothioate linkage
atgaggaccaccagcatggtggc

SEQ ID NO: 394 - RNA, 23 nt, synthetic construct
  source 1..23: mol_type = other RNA
  misc_feature 1..23: note = Antisense: ETXS696; corresponding to SEQ ID NO: 154
  modified_base 1: mod_base = OTHER; note = 2'O-methyl-adenosine
  modified_base 2: mod_base = OTHER; note = 2' Fluoro-uridine
  modified_base 3: mod_base = cm
  modified_base 4: mod_base = gm
  modified_base 5: mod_base = um
  modified_base 6: mod_base = OTHER; note = 2' Fluoro-guanosine
  modified_base 7: mod_base = cm
  modified_base 8: mod_base = OTHER; note = 2' Fluoro-cytidine
  modified_base 9: mod_base = OTHER; note = 2' Fluoro-uridine
  modified_base 10: mod_base = cm
  modified_base 11: mod_base = OTHER; note = 2'O-methyl-adenosine
  modified_base 12: mod_base = um
  modified_base 13: mod_base = gm
  modified_base 14: mod_base = OTHER; note = 2' Fluoro-guanosine
  modified_base 15: mod_base = OTHER; note = 2'O-methyl-adenosine
  modified_base 16: mod_base = OTHER; note = 2' Fluoro-guanosine
  modified_base 17: mod_base = OTHER; note = 2'O-methyl-adenosine
  modified_base 18: mod_base = um
  modified_base 19: mod_base = cm
  modified_base 20: mod_base = um
  modified_base 21: mod_base = um
  modified_base 22: mod_base = um
  modified_base 23: mod_base = cm
  modified_base 1^2: mod_base = OTHER; note = phosphorothioate linkage
  modified_base 2^3: mod_base = OTHER; note = phosphorothioate linkage
  modified_base 21^22: mod_base = OTHER; note = phosphorothioate linkage
  modified_base 22^23: mod_base = OTHER; note = phosphorothioate linkage
atcgtgcctcatggagatctttc

SEQ ID NO: 395 - RNA, 23 nt, synthetic construct
  source 1..23: mol_type = other RNA
  misc_feature 1..23: note = Antisense: ETXS698; corresponding to SEQ ID NO: 155
  modified_base 1: mod_base = cm
  modified_base 2: mod_base = OTHER; note = 2' Fluoro-uridine
  modified_base 3: mod_base = um
  modified_base 4: mod_base = gm
  modified_base 5: mod_base = um
  modified_base 6: mod_base = OTHER; note = 2' Fluoro-guanosine
  modified_base 7: mod_base = gm
  modified_base 8: mod_base = OTHER; note = 2'Fluoro-adenosine
  modified_base 9: mod_base = OTHER; note = 2' Fluoro-uridine
  modified_base 10: mod_base = gm
  modified_base 11: mod_base = OTHER; note = 2'O-methyl-adenosine
  modified_base 12: mod_base = OTHER; note = 2'O-methyl-adenosine
  modified_base 13: mod_base = gm
  modified_base 14: mod_base = OTHER; note = 2' Fluoro-guanosine
  modified_base 15: mod_base = cm
  modified_base 16: mod_base = OTHER; note = 2'Fluoro-adenosine
  modified_base 17: mod_base = OTHER; note = 2'O-methyl-adenosine
  modified_base 18: mod_base = OTHER; note = 2'O-methyl-adenosine
  modified_base 19: mod_base = OTHER; note = 2'O-methyl-adenosine
  modified_base 20: mod_base = cm
  modified_base 21: mod_base = um
  modified_base 22: mod_base = cm
  modified_base 23: mod_base = cm
  modified_base 1^2: mod_base = OTHER; note = phosphorothioate linkage
  modified_base 2^3: mod_base = OTHER; note = phosphorothioate linkage
  modified_base 21^22: mod_base = OTHER; note = phosphorothioate linkage
  modified_base 22^23: mod_base = OTHER; note = phosphorothioate linkage
cttgtggatgaaggcaaaactcc

SEQ ID NO: 396 - RNA, 23 nt, synthetic construct
  source 1..23: mol_type = other RNA
  misc_feature 1..23: note = Antisense: ETXS700; corresponding to SEQ ID NO: 156
  modified_base 1: mod_base = cm
  modified_base 2: mod_base = OTHER; note = 2'Fluoro-adenosine
  modified_base 3: mod_base = um
  modified_base 4: mod_base = gm
  modified_base 5: mod_base = OTHER; note = 2'O-methyl-adenosine
  modified_base 6: mod_base = OTHER; note = 2' Fluoro-guanosine
  modified_base 7: mod_base = gm
  modified_base 8: mod_base = OTHER; note = 2'Fluoro-adenosine
  modified_base 9: mod_base = OTHER; note = 2' Fluoro-cytidine
  modified_base 10: mod_base = cm
  modified_base 11: mod_base = OTHER; note = 2'O-methyl-adenosine
  modified_base 12: mod_base = cm
  modified_base 13: mod_base = cm
  modified_base 14: mod_base = OTHER; note = 2'Fluoro-adenosine
  modified_base 15: mod_base = gm
  modified_base 16: mod_base = OTHER; note = 2' Fluoro-cytidine
  modified_base 17: mod_base = OTHER; note = 2'O-methyl-adenosine
  modified_base 18: mod_base = um
  modified_base 19: mod_base = gm
  modified_base 20: mod_base = gm
  modified_base 21: mod_base = um
  modified_base 22: mod_base = gm
  modified_base 23: mod_base = gm
  modified_base 1^2: mod_base = OTHER; note = phosphorothioate linkage
  modified_base 2^3: mod_base = OTHER; note = phosphorothioate linkage
  modified_base 21^22: mod_base = OTHER; note = phosphorothioate linkage
  modified_base 22^23: mod_base = OTHER; note = phosphorothioate linkage
catgaggaccaccagcatggtgg

SEQ ID NO: 397 - RNA, 23 nt, synthetic construct
  source 1..23: mol_type = other RNA
  misc_feature 1..23: note = Antisense: ETXS702; corresponding to SEQ ID NO: 157
  modified_base 1: mod_base = cm
  modified_base 2: mod_base = OTHER; note = 2'Fluoro-adenosine
  modified_base 3: mod_base = um
  modified_base 4: mod_base = cm
  modified_base 5: mod_base = gm
  modified_base 6: mod_base = OTHER; note = 2' Fluoro-uridine
  modified_base 7: mod_base = gm
  modified_base 8: mod_base = OTHER; note = 2' Fluoro-cytidine
  modified_base 9: mod_base = OTHER; note = 2' Fluoro-cytidine
  modified_base 10: mod_base = um
  modified_base 11: mod_base = cm
  modified_base 12: mod_base = OTHER; note = 2'O-methyl-adenosine
  modified_base 13: mod_base = um
  modified_base 14: mod_base = OTHER; note = 2' Fluoro-guanosine
  modified_base 15: mod_base = gm
  modified_base 16: mod_base = OTHER; note = 2'Fluoro-adenosine
  modified_base 17: mod_base = gm
  modified_base 18: mod_base = OTHER; note = 2'O-methyl-adenosine
  modified_base 19: mod_base = um
  modified_base 20: mod_base = cm
  modified_base 21: mod_base = um
  modified_base 22: mod_base = um
  modified_base 23: mod_base = um
  modified_base 1^2: mod_base = OTHER; note = phosphorothioate linkage
  modified_base 2^3: mod_base = OTHER; note = phosphorothioate linkage
  modified_base 21^22: mod_base = OTHER; note = phosphorothioate linkage
  modified_base 22^23: mod_base = OTHER; note = phosphorothioate linkage
catcgtgcctcatggagatcttt

SEQ ID NO: 398 - RNA, 23 nt, synthetic construct
  source 1..23: mol_type = other RNA
  misc_feature 1..23: note = Antisense: ETXS704; corresponding to SEQ ID NO: 158
  modified_base 1: mod_base = cm
  modified_base 2: mod_base = OTHER; note = 2' Fluoro-cytidine
  modified_base 3: mod_base = OTHER; note = 2'O-methyl-adenosine
  modified_base 4: mod_base = um
  modified_base 5: mod_base = gm
  modified_base 6: mod_base = OTHER; note = 2'Fluoro-adenosine
  modified_base 7: mod_base = gm
  modified_base 8: mod_base = OTHER; note = 2' Fluoro-guanosine
  modified_base 9: mod_base = OTHER; note = 2'Fluoro-adenosine
  modified_base 10: mod_base = cm
  modified_base 11: mod_base = cm
  modified_base 12: mod_base = OTHER; note = 2'O-methyl-adenosine
  modified_base 13: mod_base = cm
  modified_base 14: mod_base = OTHER; note = 2' Fluoro-cytidine
  modified_base 15: mod_base = OTHER; note = 2'O-methyl-adenosine
  modified_base 16: mod_base = OTHER; note = 2' Fluoro-guanosine
  modified_base 17: mod_base = cm
  modified_base 18: mod_base = OTHER; note = 2'O-methyl-adenosine
  modified_base 19: mod_base = um
  modified_base 20: mod_base = gm
  modified_base 21: mod_base = gm
  modified_base 22: mod_base = um
  modified_base 23: mod_base = gm
  modified_base 1^2: mod_base = OTHER; note = phosphorothioate linkage
  modified_base 2^3: mod_base = OTHER; note = phosphorothioate linkage
  modified_base 21^22: mod_base = OTHER; note = phosphorothioate linkage
  modified_base 22^23: mod_base = OTHER; note = phosphorothioate linkage
ccatgaggaccaccagcatggtg

SEQ ID NO: 399 - RNA, 23 nt, synthetic construct
  source 1..23: mol_type = other RNA
  misc_feature 1..23: note = Antisense: ETXS706; corresponding to SEQ ID NO: 159
  modified_base 1: mod_base = um
  modified_base 2: mod_base = OTHER; note = 2' Fluoro-uridine
  modified_base 3: mod_base = cm
  modified_base 4: mod_base = um
  modified_base 5: mod_base = um
  modified_base 6: mod_base = OTHER; note = 2' Fluoro-guanosine
  modified_base 7: mod_base = um
  modified_base 8: mod_base = OTHER; note = 2' Fluoro-cytidine
  modified_base 9: mod_base = OTHER; note = 2'Fluoro-adenosine
  modified_base 10: mod_base = OTHER; note = 2'O-methyl-adenosine
  modified_base 11: mod_base = OTHER; note = 2'O-methyl-adenosine
  modified_base 12: mod_base = gm
  modified_base 13: mod_base = gm
  modified_base 14: mod_base = OTHER; note = 2' Fluoro-uridine
  modified_base 15: mod_base = gm
  modified_base 16: mod_base = OTHER; note = 2' Fluoro-guanosine
  modified_base 17: mod_base = OTHER; note = 2'O-methyl-adenosine
  modified_base 18: mod_base = gm
  modified_base 19: mod_base = gm
  modified_base 20: mod_base = cm
  modified_base 21: mod_base = OTHER; note = 2'O-methyl-adenosine
  modified_base 22: mod_base = OTHER; note = 2'O-methyl-adenosine
  modified_base 23: mod_base = OTHER; note = 2'O-methyl-adenosine
  modified_base 1^2: mod_base = OTHER; note = phosphorothioate linkage
  modified_base 2^3: mod_base = OTHER; note = phosphorothioate linkage
  modified_base 21^22: mod_base = OTHER; note = phosphorothioate linkage
  modified_base 22^23: mod_base = OTHER; note = phosphorothioate linkage
ttcttgtcaaaggtggaggcaaa

SEQ ID NO: 400 - RNA, 23 nt, synthetic construct
  source 1..23: mol_type = other RNA
  misc_feature 1..23: note = Antisense: ETXS708; corresponding to SEQ ID NO: 160
  modified_base 1: mod_base = OTHER; note = 2'O-methyl-adenosine
  modified_base 2: mod_base = OTHER; note = 2'Fluoro-adenosine
  modified_base 3: mod_base = um
  modified_base 4: mod_base = um
  modified_base 5: mod_base = cm
  modified_base 6: mod_base = OTHER; note = 2' Fluoro-uridine
  modified_base 7: mod_base = um
  modified_base 8: mod_base = OTHER; note = 2' Fluoro-guanosine
  modified_base 9: mod_base = OTHER; note = 2' Fluoro-uridine
  modified_base 10: mod_base = cm
  modified_base 11: mod_base = OTHER; note = 2'O-methyl-adenosine
  modified_base 12: mod_base = OTHER; note = 2'O-methyl-adenosine
  modified_base 13: mod_base = OTHER; note = 2'O-methyl-adenosine
  modified_base 14: mod_base = OTHER; note = 2' Fluoro-guanosine
  modified_base 15: mod_base = gm
  modified_base 16: mod_base = OTHER; note = 2' Fluoro-uridine
  modified_base 17: mod_base = gm
  modified_base 18: mod_base = gm
  modified_base 19: mod_base = OTHER; note = 2'O-methyl-adenosine
  modified_base 20: mod_base = gm
  modified_base 21: mod_base = gm
  modified_base 22: mod_base = cm
  modified_base 23: mod_base = OTHER; note = 2'O-methyl-adenosine
  modified_base 1^2: mod_base = OTHER; note = phosphorothioate linkage
  modified_base 2^3: mod_base = OTHER; note = phosphorothioate linkage
  modified_base 21^22: mod_base = OTHER; note = phosphorothioate linkage
  modified_base 22^23: mod_base = OTHER; note = phosphorothioate linkage
aattcttgtcaaaggtggaggca

SEQ ID NO: 401 - RNA, 23 nt, synthetic construct
  source 1..23: mol_type = other RNA
  misc_feature 1..23: note = Antisense: ETXS710; corresponding to SEQ ID NO: 161
  modified_base 1: mod_base = um
  modified_base 2: mod_base = OTHER; note = 2'Fluoro-adenosine
  modified_base 3: mod_base = cm
  modified_base 4: mod_base = OTHER; note = 2'O-methyl-adenosine
  modified_base 5: mod_base = um
  modified_base 6: mod_base = OTHER; note = 2' Fluoro-cytidine
  modified_base 7: mod_base = OTHER; note = 2'O-methyl-adenosine
  modified_base 8: mod_base = OTHER; note = 2' Fluoro-uridine
  modified_base 9: mod_base = OTHER; note = 2' Fluoro-guanosine
  modified_base 10: mod_base = gm
  modified_base 11: mod_base = gm
  modified_base 12: mod_base = cm
  modified_base 13: mod_base = OTHER; note = 2'O-methyl-adenosine
  modified_base 14: mod_base = OTHER; note = 2' Fluoro-cytidine
  modified_base 15: mod_base = cm
  modified_base 16: mod_base = OTHER; note = 2' Fluoro-uridine
  modified_base 17: mod_base = um
  modified_base 18: mod_base = OTHER; note = 2'O-methyl-adenosine
  modified_base 19: mod_base = OTHER; note = 2'O-methyl-adenosine
  modified_base 20: mod_base = um
  modified_base 21: mod_base = gm
  modified_base 22: mod_base = gm
  modified_base 23: mod_base = um
  modified_base 1^2: mod_base = OTHER; note = phosphorothioate linkage
  modified_base 2^3: mod_base = OTHER; note = phosphorothioate linkage
  modified_base 21^22: mod_base = OTHER; note = phosphorothioate linkage
  modified_base 22^23: mod_base = OTHER; note = phosphorothioate linkage
tacatcatgggcaccttaatggt

SEQ ID NO: 402 - RNA, 23 nt, synthetic construct
  source 1..23: mol_type = other RNA
  misc_feature 1..23: note = Antisense: ETXS712; corresponding to SEQ ID NO: 162
  modified_base 1: mod_base = gm
  modified_base 2: mod_base = OTHER; note = 2' Fluoro-guanosine
  modified_base 3: mod_base = cm
  modified_base 4: mod_base = OTHER; note = 2'O-methyl-adenosine
  modified_base 5: mod_base = um
  modified_base 6: mod_base = OTHER; note = 2' Fluoro-uridine
  modified_base 7: mod_base = um
  modified_base 8: mod_base = OTHER; note = 2' Fluoro-cytidine
  modified_base 9: mod_base = OTHER; note = 2' Fluoro-cytidine
  modified_base 10: mod_base = um
  modified_base 11: mod_base = um
  modified_base 12: mod_base = gm
  modified_base 13: mod_base = gm
  modified_base 14: mod_base = OTHER; note = 2' Fluoro-uridine
  modified_base 15: mod_base = OTHER; note = 2'O-methyl-adenosine
  modified_base 16: mod_base = OTHER; note = 2' Fluoro-guanosine
  modified_base 17: mod_base = gm
  modified_base 18: mod_base = gm
  modified_base 19: mod_base = cm
  modified_base 20: mod_base = OTHER; note = 2'O-methyl-adenosine
  modified_base 21: mod_base = gm
  modified_base 22: mod_base = um
  modified_base 23: mod_base = um
  modified_base 1^2: mod_base = OTHER; note = phosphorothioate linkage
  modified_base 2^3: mod_base = OTHER; note = phosphorothioate linkage
  modified_base 21^22: mod_base = OTHER; note = phosphorothioate linkage
  modified_base 22^23: mod_base = OTHER; note = phosphorothioate linkage
ggcatttccttggtagggcagtt

SEQ ID NO: 403 - RNA, 23 nt, synthetic construct
  source 1..23: mol_type = other RNA
  misc_feature 1..23: note = Antisense: ETXS714; corresponding to SEQ ID NO: 163
  modified_base 1: mod_base = um
  modified_base 2: mod_base = OTHER; note = 2' Fluoro-uridine
  modified_base 3: mod_base = um
  modified_base 4: mod_base = cm
  modified_base 5: mod_base = cm
  modified_base 6: mod_base = OTHER; note = 2' Fluoro-uridine
  modified_base 7: mod_base = um
  modified_base 8: mod_base = OTHER; note = 2' Fluoro-guanosine
  modified_base 9: mod_base = OTHER; note = 2' Fluoro-guanosine
  modified_base 10: mod_base = um
  modified_base 11: mod_base = OTHER; note = 2'O-methyl-adenosine
  modified_base 12: mod_base = gm
  modified_base 13: mod_base = gm
  modified_base 14: mod_base = OTHER; note = 2' Fluoro-guanosine
  modified_base 15: mod_base = cm
  modified_base 16: mod_base = OTHER; note = 2'Fluoro-adenosine
  modified_base 17: mod_base = gm
  modified_base 18: mod_base = um
  modified_base 19: mod_base = um
  modified_base 20: mod_base = um
  modified_base 21: mod_base = gm
  modified_base 22: mod_base = OTHER; note = 2'O-methyl-adenosine
  modified_base 23: mod_base = gm
  modified_base 1^2: mod_base = OTHER; note = phosphorothioate linkage
  modified_base 2^3: mod_base = OTHER; note = phosphorothioate linkage
  modified_base 21^22: mod_base = OTHER; note = phosphorothioate linkage
  modified_base 22^23: mod_base = OTHER; note = phosphorothioate linkage
tttccttggtagggcagtttgag

SEQ ID NO: 404 - RNA, 23 nt, synthetic construct
  source 1..23: mol_type = other RNA
  misc_feature 1..23: note = Antisense: ETXS716; corresponding to SEQ ID NO: 164
  modified_base 1: mod_base = um
  modified_base 2: mod_base = OTHER; note = 2' Fluoro-uridine
  modified_base 3: mod_base = cm
  modified_base 4: mod_base = cm
  modified_base 5: mod_base = um
  modified_base 6: mod_base = OTHER; note = 2' Fluoro-uridine
  modified_base 7: mod_base = gm
  modified_base 8: mod_base = OTHER; note = 2' Fluoro-guanosine
  modified_base 9: mod_base = OTHER; note = 2' Fluoro-uridine
  modified_base 10: mod_base = OTHER; note = 2'O-methyl-adenosine
  modified_base 11: mod_base = gm
  modified_base 12: mod_base = gm
  modified_base 13: mod_base = gm
  modified_base 14: mod_base = OTHER; note = 2' Fluoro-cytidine
  modified_base 15: mod_base = OTHER; note = 2'O-methyl-adenosine
  modified_base 16: mod_base = OTHER; note = 2' Fluoro-guanosine
  modified_base 17: mod_base = um
  modified_base 18: mod_base = um
  modified_base 19: mod_base = um
  modified_base 20: mod_base = gm
  modified_base 21: mod_base = OTHER; note = 2'O-methyl-adenosine
  modified_base 22: mod_base = gm
  modified_base 23: mod_base = gm
  modified_base 1^2: mod_base = OTHER; note = phosphorothioate linkage
  modified_base 2^3: mod_base = OTHER; note = phosphorothioate linkage
  modified_base 21^22: mod_base = OTHER; note = phosphorothioate linkage
  modified_base 22^23: mod_base = OTHER; note = phosphorothioate linkage
ttccttggtagggcagtttgagg

SEQ ID NO: 405 - RNA, 23 nt, synthetic construct
  source 1..23: mol_type = other RNA
  misc_feature 1..23: note = Antisense: ETXS718; corresponding to SEQ ID NO: 165
  modified_base 1: mod_base = OTHER; note = 2'O-methyl-adenosine
  modified_base 2: mod_base = OTHER; note = 2'Fluoro-adenosine
  modified_base 3: mod_base = OTHER; note = 2'O-methyl-adenosine
  modified_base 4: mod_base = um
  modified_base 5: mod_base = um
  modified_base 6: mod_base = OTHER; note = 2' Fluoro-cytidine
  modified_base 7: mod_base = um
  modified_base 8: mod_base = OTHER; note = 2' Fluoro-uridine
  modified_base 9: mod_base = OTHER; note = 2' Fluoro-guanosine
  modified_base 10: mod_base = um
  modified_base 11: mod_base = cm
  modified_base 12: mod_base = OTHER; note = 2'O-methyl-adenosine
  modified_base 13: mod_base = OTHER; note = 2'O-methyl-adenosine
  modified_base 14: mod_base = OTHER; note = 2'Fluoro-adenosine
  modified_base 15: mod_base = gm
  modified_base 16: mod_base = OTHER; note = 2' Fluoro-guanosine
  modified_base 17: mod_base = um
  modified_base 18: mod_base = gm
  modified_base 19: mod_base = gm
  modified_base 20: mod_base = OTHER; note = 2'O-methyl-adenosine
  modified_base 21: mod_base = gm
  modified_base 22: mod_base = gm
  modified_base 23: mod_base = cm
  modified_base 1^2: mod_base = OTHER; note = phosphorothioate linkage
  modified_base 2^3: mod_base = OTHER; note = phosphorothioate linkage
  modified_base 21^22: mod_base = OTHER; note = phosphorothioate linkage
  modified_base 22^23: mod_base = OTHER; note = phosphorothioate linkage
aaattcttgtcaaaggtggaggc

SEQ ID NO: 406 - RNA, 23 nt, synthetic construct
  source 1..23: mol_type = other RNA
  misc_feature 1..23: note = Antisense: ETXS720; corresponding to SEQ ID NO: 166
  modified_base 1: mod_base = um
  modified_base 2: mod_base = OTHER; note = 2' Fluoro-uridine
  modified_base 3: mod_base = gm
  modified_base 4: mod_base = um
  modified_base 5: mod_base = cm
  modified_base 6: mod_base = OTHER; note = 2' Fluoro-cytidine
  modified_base 7: mod_base = OTHER; note = 2'O-methyl-adenosine
  modified_base 8: mod_base = OTHER; note = 2' Fluoro-guanosine
  modified_base 9: mod_base = OTHER; note = 2' Fluoro-guanosine
  modified_base 10: mod_base = um
  modified_base 11: mod_base = gm
  modified_base 12: mod_base = gm
  modified_base 13: mod_base = OTHER; note = 2'O-methyl-adenosine
  modified_base 14: mod_base = OTHER; note = 2'Fluoro-adenosine
  modified_base 15: mod_base = OTHER; note = 2'O-methyl-adenosine
  modified_base 16: mod_base = OTHER; note = 2' Fluoro-guanosine
  modified_base 17: mod_base = um
  modified_base 18: mod_base = gm
  modified_base 19: mod_base = um
  modified_base 20: mod_base = cm
  modified_base 21: mod_base = gm
  modified_base 22: mod_base = OTHER; note = 2'O-methyl-adenosine
  modified_base 23: mod_base = cm
  modified_base 1^2: mod_base = OTHER; note = phosphorothioate linkage
  modified_base 2^3: mod_base = OTHER; note = phosphorothioate linkage
  modified_base 21^22: mod_base = OTHER; note = phosphorothioate linkage
  modified_base 22^23: mod_base = OTHER; note = phosphorothioate linkage
ttgtccaggtggaaagtgtcgac

SEQ ID NO: 407 - RNA, 23 nt, synthetic construct
  source 1..23: mol_type = other RNA
  misc_feature 1..23: note = Antisense: ETXS722; corresponding to SEQ ID NO: 167
  modified_base 1: mod_base = gm
  modified_base 2: mod_base = OTHER; note = 2' Fluoro-uridine
  modified_base 3: mod_base = OTHER; note = 2'O-methyl-adenosine
  modified_base 4: mod_base = cm
  modified_base 5: mod_base = um
  modified_base 6: mod_base = OTHER; note = 2' Fluoro-uridine
  modified_base 7: mod_base = gm
  modified_base 8: mod_base = OTHER; note = 2' Fluoro-uridine
  modified_base 9: mod_base = OTHER; note = 2' Fluoro-cytidine
  modified_base 10: mod_base = cm
  modified_base 11: mod_base = OTHER; note = 2'O-methyl-adenosine
  modified_base 12: mod_base = gm
  modified_base 13: mod_base = gm
  modified_base 14: mod_base = OTHER; note = 2' Fluoro-uridine
  modified_base 15: mod_base = gm
  modified_base 16: mod_base = OTHER; note = 2' Fluoro-guanosine
  modified_base 17: mod_base = OTHER; note = 2'O-methyl-adenosine
  modified_base 18: mod_base = OTHER; note = 2'O-methyl-adenosine
  modified_base 19: mod_base = OTHER; note = 2'O-methyl-adenosine
  modified_base 20: mod_base = gm
  modified_base 21: mod_base = um
  modified_base 22: mod_base = gm
  modified_base 23: mod_base = um
  modified_base 1^2: mod_base = OTHER; note = phosphorothioate linkage
  modified_base 2^3: mod_base = OTHER; note = phosphorothioate linkage
  modified_base 21^22: mod_base = OTHER; note = phosphorothioate linkage
  modified_base 22^23: mod_base = OTHER; note = phosphorothioate linkage
gtacttgtccaggtggaaagtgt

SEQ ID NO: 408 - RNA, 23 nt, synthetic construct
  source 1..23: mol_type = other RNA
  misc_feature 1..23: note = Antisense: ETXS724; corresponding to SEQ ID NO: 168
  modified_base 1: mod_base = OTHER; note = 2'O-methyl-adenosine
  modified_base 2: mod_base = OTHER; note = 2' Fluoro-uridine
  modified_base 3: mod_base = um
  modified_base 4: mod_base = um
  modified_base 5: mod_base = cm
  modified_base 6: mod_base = OTHER; note = 2' Fluoro-cytidine
  modified_base 7: mod_base = um
  modified_base 8: mod_base = OTHER; note = 2' Fluoro-uridine
  modified_base 9: mod_base = OTHER; note = 2' Fluoro-guanosine
  modified_base 10: mod_base = gm
  modified_base 11: mod_base = um
  modified_base 12: mod_base = OTHER; note = 2'O-methyl-adenosine
  modified_base 13: mod_base = gm
  modified_base 14: mod_base = OTHER; note = 2' Fluoro-guanosine
  modified_base 15: mod_base = gm
  modified_base 16: mod_base = OTHER; note = 2' Fluoro-cytidine
  modified_base 17: mod_base = OTHER; note = 2'O-methyl-adenosine
  modified_base 18: mod_base = gm
  modified_base 19: mod_base = um
  modified_base 20: mod_base = um
  modified_base 21: mod_base = um
  modified_base 22: mod_base = gm
  modified_base 23: mod_base = OTHER; note = 2'O-methyl-adenosine
  modified_base 1^2: mod_base = OTHER; note = phosphorothioate linkage
  modified_base 2^3: mod_base = OTHER; note = phosphorothioate linkage
  modified_base 21^22: mod_base = OTHER; note = phosphorothioate linkage
  modified_base 22^23: mod_base = OTHER; note = phosphorothioate linkage
atttccttggtagggcagtttga

SEQ ID NO: 409 - RNA, 23 nt, synthetic construct
  source 1..23: mol_type = other RNA
  misc_feature 1..23: note = Antisense: ETXS726; corresponding to SEQ ID NO: 169
  modified_base 1: mod_base = gm
  modified_base 2: mod_base = OTHER; note = 2' Fluoro-cytidine
  modified_base 3: mod_base = OTHER; note = 2'O-methyl-adenosine
  modified_base 4: mod_base = um
  modified_base 5: mod_base = um
  modified_base 6: mod_base = OTHER; note = 2' Fluoro-uridine
  modified_base 7: mod_base = cm
  modified_base 8: mod_base = OTHER; note = 2' Fluoro-cytidine
  modified_base 9: mod_base = OTHER; note = 2' Fluoro-uridine
  modified_base 10: mod_base = um
  modified_base 11: mod_base = gm
  modified_base 12: mod_base = gm
  modified_base 13: mod_base = um
  modified_base 14: mod_base = OTHER; note = 2'Fluoro-adenosine
  modified_base 15: mod_base = gm
  modified_base 16: mod_base = OTHER; note = 2' Fluoro-guanosine
  modified_base 17: mod_base = gm
  modified_base 18: mod_base = cm
  modified_base 19: mod_base = OTHER; note = 2'O-methyl-adenosine
  modified_base 20: mod_base = gm
  modified_base 21: mod_base = um
  modified_base 22: mod_base = um
  modified_base 23: mod_base = um
  modified_base 1^2: mod_base = OTHER; note = phosphorothioate linkage
  modified_base 2^3: mod_base = OTHER; note = phosphorothioate linkage
  modified_base 21^22: mod_base = OTHER; note = phosphorothioate linkage
  modified_base 22^23: mod_base = OTHER; note = phosphorothioate linkage
gcatttccttggtagggcagttt

SEQ ID NO: 410 - RNA, 23 nt, synthetic construct
  source 1..23: mol_type = other RNA
  misc_feature 1..23: note = Antisense: ETXS728; corresponding to SEQ ID NO: 170
  modified_base 1: mod_base = um
  modified_base 2: mod_base = OTHER; note = 2'Fluoro-adenosine
  modified_base 3: mod_base = cm
  modified_base 4: mod_base = um
  modified_base 5: mod_base = um
  modified_base 6: mod_base = OTHER; note = 2' Fluoro-guanosine
  modified_base 7: mod_base = um
  modified_base 8: mod_base = OTHER; note = 2' Fluoro-cytidine
  modified_base 9: mod_base = OTHER; note = 2' Fluoro-cytidine
  modified_base 10: mod_base = OTHER; note = 2'O-methyl-adenosine
  modified_base 11: mod_base = gm
  modified_base 12: mod_base = gm
  modified_base 13: mod_base = um
  modified_base 14: mod_base = OTHER; note = 2' Fluoro-guanosine
  modified_base 15: mod_base = gm
  modified_base 16: mod_base = OTHER; note = 2'Fluoro-adenosine
  modified_base 17: mod_base = OTHER; note = 2'O-methyl-adenosine
  modified_base 18: mod_base = OTHER; note = 2'O-methyl-adenosine
  modified_base 19: mod_base = gm
  modified_base 20: mod_base = um
  modified_base 21: mod_base = gm
  modified_base 22: mod_base = um
  modified_base 23: mod_base = cm
  modified_base 1^2: mod_base = OTHER; note = phosphorothioate linkage
  modified_base 2^3: mod_base = OTHER; note = phosphorothioate linkage
  modified_base 21^22: mod_base = OTHER; note = phosphorothioate linkage
  modified_base 22^23: mod_base = OTHER; note = phosphorothioate linkage
tacttgtccaggtggaaagtgtc

SEQ ID NO: 411 - RNA, 23 nt, synthetic construct
  source 1..23: mol_type = other RNA
  misc_feature 1..23: note = Antisense: ETXS730; corresponding to SEQ ID NO: 171
  modified_base 1: mod_base = OTHER; note = 2'O-methyl-adenosine
  modified_base 2: mod_base = OTHER; note = 2' Fluoro-cytidine
  modified_base 3: mod_base = OTHER; note = 2'O-methyl-adenosine
  modified_base 4: mod_base = um
  modified_base 5: mod_base = cm
  modified_base 6: mod_base = OTHER; note = 2'Fluoro-adenosine
  modified_base 7: mod_base = um
  modified_base 8: mod_base = OTHER; note = 2' Fluoro-guanosine
  modified_base 9: mod_base = OTHER; note = 2' Fluoro-guanosine
  modified_base 10: mod_base = gm
  modified_base 11: mod_base = cm
  modified_base 12: mod_base = OTHER; note = 2'O-methyl-adenosine
  modified_base 13: mod_base = cm
  modified_base 14: mod_base = OTHER; note = 2' Fluoro-cytidine
  modified_base 15: mod_base = um
  modified_base 16: mod_base = OTHER; note = 2' Fluoro-uridine
  modified_base 17: mod_base = OTHER; note = 2'O-methyl-adenosine
  modified_base 18: mod_base = OTHER; note = 2'O-methyl-adenosine
  modified_base 19: mod_base = um
  modified_base 20: mod_base = gm
  modified_base 21: mod_base = gm
  modified_base 22: mod_base = um
  modified_base 23: mod_base = cm
  modified_base 1^2: mod_base = OTHER; note = phosphorothioate linkage
  modified_base 2^3: mod_base = OTHER; note = phosphorothioate linkage
  modified_base 21^22: mod_base = OTHER; note = phosphorothioate linkage
  modified_base 22^23: mod_base = OTHER; note = phosphorothioate linkage
acatcatgggcaccttaatggtc

SEQ ID NO: 412 - RNA, 23 nt, synthetic construct
  source 1..23: mol_type = other RNA
  misc_feature 1..23: note = Antisense: ETXS732; corresponding to SEQ ID NO: 172
  modified_base 1: mod_base = um
  modified_base 2: mod_base = OTHER; note = 2' Fluoro-cytidine
  modified_base 3: mod_base = um
  modified_base 4: mod_base = um
  modified_base 5: mod_base = gm
  modified_base 6: mod_base = OTHER; note = 2' Fluoro-uridine
  modified_base 7: mod_base = cm
  modified_base 8: mod_base = OTHER; note = 2'Fluoro-adenosine
  modified_base 9: mod_base = OTHER; note = 2'Fluoro-adenosine
  modified_base 10: mod_base = OTHER; note = 2'O-methyl-adenosine
  modified_base 11: mod_base = gm
  modified_base 12: mod_base = gm
  modified_base 13: mod_base = um
  modified_base 14: mod_base = OTHER; note = 2' Fluoro-guanosine
  modified_base 15: mod_base = gm
  modified_base 16: mod_base = OTHER; note = 2'Fluoro-adenosine
  modified_base 17: mod_base = gm
  modified_base 18: mod_base = gm
  modified_base 19: mod_base = cm
  modified_base 20: mod_base = OTHER; note = 2'O-methyl-adenosine
  modified_base 21: mod_base = OTHER; note = 2'O-methyl-adenosine
  modified_base 22: mod_base = OTHER; note = 2'O-methyl-adenosine
  modified_base 23: mod_base = cm
  modified_base 1^2: mod_base = OTHER; note = phosphorothioate linkage
  modified_base 2^3: mod_base = OTHER; note = phosphorothioate linkage
  modified_base 21^22: mod_base = OTHER; note = phosphorothioate linkage
  modified_base 22^23: mod_base = OTHER; note = phosphorothioate linkage
tcttgtcaaaggtggaggcaaac

SEQ ID NO: 413 - RNA, 23 nt, synthetic construct
  source 1..23: mol_type = other RNA
  misc_feature 1..23: note = Antisense: ETXS734; corresponding to SEQ ID NO: 173
  modified_base 1: mod_base = um
  modified_base 2: mod_base = OTHER; note = 2' Fluoro-uridine
  modified_base 3: mod_base = gm
  modified_base 4: mod_base = um
  modified_base 5: mod_base = OTHER; note = 2'O-methyl-adenosine
  modified_base 6: mod_base = OTHER; note = 2' Fluoro-cytidine
  modified_base 7: mod_base = um
  modified_base 8: mod_base = OTHER; note = 2' Fluoro-uridine
  modified_base 9: mod_base = OTHER; note = 2' Fluoro-guanosine
  modified_base 10: mod_base = um
  modified_base 11: mod_base = cm
  modified_base 12: mod_base = cm
  modified_base 13: mod_base = OTHER; note = 2'O-methyl-adenosine
  modified_base 14: mod_base = OTHER; note = 2' Fluoro-guanosine
  modified_base 15: mod_base = gm
  modified_base 16: mod_base = OTHER; note = 2' Fluoro-uridine
  modified_base 17: mod_base = gm
  modified_base 18: mod_base = gm
  modified_base 19: mod_base = OTHER; note = 2'O-methyl-adenosine
  modified_base 20: mod_base = OTHER; note = 2'O-methyl-adenosine
  modified_base 21: mod_base = OTHER; note = 2'O-methyl-adenosine
  modified_base 22: mod_base = gm
  modified_base 23: mod_base = um
  modified_base 1^2: mod_base = OTHER; note = phosphorothioate linkage
  modified_base 2^3: mod_base = OTHER; note = phosphorothioate linkage
  modified_base 21^22: mod_base = OTHER; note = phosphorothioate linkage
  modified_base 22^23: mod_base = OTHER; note = phosphorothioate linkage
ttgtacttgtccaggtggaaagt

SEQ ID NO: 414 - RNA, 23 nt, synthetic construct
  source 1..23: mol_type = other RNA
  misc_feature 1..23: note = Antisense: ETXS736; corresponding to SEQ ID NO: 174
  modified_base 1: mod_base = cm
  modified_base 2: mod_base = OTHER; note = 2' Fluoro-uridine
  modified_base 3: mod_base = um
  modified_base 4: mod_base = gm
  modified_base 5: mod_base = gm
  modified_base 6: mod_base = OTHER; note = 2' Fluoro-uridine
  modified_base 7: mod_base = OTHER; note = 2'O-methyl-adenosine
  modified_base 8: mod_base = OTHER; note = 2' Fluoro-guanosine
  modified_base 9: mod_base = OTHER; note = 2' Fluoro-guanosine
  modified_base 10: mod_base = gm
  modified_base 11: mod_base = cm
  modified_base 12: mod_base = OTHER; note = 2'O-methyl-adenosine
  modified_base 13: mod_base = gm
  modified_base 14: mod_base = OTHER; note = 2' Fluoro-uridine
  modified_base 15: mod_base = um
  modified_base 16: mod_base = OTHER; note = 2' Fluoro-uridine
  modified_base 17: mod_base = gm
  modified_base 18: mod_base = OTHER; note = 2'O-methyl-adenosine
  modified_base 19: mod_base = gm
  modified_base 20: mod_base = gm
  modified_base 21: mod_base = OTHER; note = 2'O-methyl-adenosine
  modified_base 22: mod_base = cm
  modified_base 23: mod_base = OTHER; note = 2'O-methyl-adenosine
  modified_base 1^2: mod_base = OTHER; note = phosphorothioate linkage
  modified_base 2^3: mod_base = OTHER; note = phosphorothioate linkage
  modified_base 21^22: mod_base = OTHER; note = phosphorothioate linkage
  modified_base 22^23: mod_base = OTHER; note = phosphorothioate linkage
cttggtagggcagtttgaggaca

SEQ ID NO: 415 - RNA, 23 nt, synthetic construct
  source 1..23: mol_type = other RNA
  misc_feature 1..23: note = Antisense: ETXS738; corresponding to SEQ ID NO: 175
  modified_base 1: mod_base = cm
  modified_base 2: mod_base = OTHER; note = 2'Fluoro-adenosine
  modified_base 3: mod_base = um
  modified_base 4: mod_base = um
  modified_base 5: mod_base = um
  modified_base 6: mod_base = OTHER; note = 2' Fluoro-cytidine
  modified_base 7: mod_base = cm
  modified_base 8: mod_base = OTHER; note = 2' Fluoro-uridine
  modified_base 9: mod_base = OTHER; note = 2' Fluoro-uridine
  modified_base 10: mod_base = gm
  modified_base 11: mod_base = gm
  modified_base 12: mod_base = um
  modified_base 13: mod_base = OTHER; note = 2'O-methyl-adenosine
  modified_base 14: mod_base = OTHER; note = 2' Fluoro-guanosine
  modified_base 15: mod_base = gm
  modified_base 16: mod_base = OTHER; note = 2' Fluoro-guanosine
  modified_base 17: mod_base = cm
  modified_base 18: mod_base = OTHER; note = 2'O-methyl-adenosine
  modified_base 19: mod_base = gm
  modified_base 20: mod_base = um
  modified_base 21: mod_base = um
  modified_base 22: mod_base = um
  modified_base 23: mod_base = gm
  modified_base 1^2: mod_base = OTHER; note = phosphorothioate linkage
  modified_base 2^3: mod_base = OTHER; note = phosphorothioate linkage
  modified_base 21^22: mod_base = OTHER; note = phosphorothioate linkage
  modified_base 22^23: mod_base = OTHER; note = phosphorothioate linkage
catttccttggtagggcagtttg

SEQ ID NO: 416 - RNA, 23 nt, synthetic construct
  source 1..23: mol_type = other RNA
  misc_feature 1..23: note = Antisense: ETXS740; corresponding to SEQ ID NO: 176
  modified_base 1: mod_base = cm
  modified_base 2: mod_base = OTHER; note = 2' Fluoro-cytidine
  modified_base 3: mod_base = um
  modified_base 4: mod_base = um
  modified_base 5: mod_base = gm
  modified_base 6: mod_base = OTHER; note = 2' Fluoro-guanosine
  modified_base 7: mod_base = um
  modified_base 8: mod_base = OTHER; note = 2'Fluoro-adenosine
  modified_base 9: mod_base = OTHER; note = 2' Fluoro-guanosine
  modified_base 10: mod_base = gm
  modified_base 11: mod_base = gm
  modified_base 12: mod_base = cm
  modified_base 13: mod_base = OTHER; note = 2'O-methyl-adenosine
  modified_base 14: mod_base = OTHER; note = 2' Fluoro-guanosine
  modified_base 15: mod_base = um
  modified_base 16: mod_base = OTHER; note = 2' Fluoro-uridine
  modified_base 17: mod_base = um
  modified_base 18: mod_base = gm
  modified_base 19: mod_base = OTHER; note = 2'O-methyl-adenosine
  modified_base 20: mod_base = gm
  modified_base 21: mod_base = gm
  modified_base 22: mod_base = OTHER; note = 2'O-methyl-adenosine
  modified_base 23: mod_base = cm
  modified_base 1^2: mod_base = OTHER; note = phosphorothioate linkage
  modified_base 2^3: mod_base = OTHER; note = phosphorothioate linkage
  modified_base 21^22: mod_base = OTHER; note = phosphorothioate linkage
  modified_base 22^23: mod_base = OTHER; note = phosphorothioate linkage
ccttggtagggcagtttgaggac

SEQ ID NO: 417 - RNA, 23 nt, synthetic construct
  source 1..23: mol_type = other RNA
  misc_feature 1..23: note = Antisense: ETXS742; corresponding to SEQ ID NO: 177
  modified_base 1: mod_base = um
  modified_base 2: mod_base = OTHER; note = 2' Fluoro-uridine
  modified_base 3: mod_base = gm
  modified_base 4: mod_base = gm
  modified_base 5: mod_base = um
  modified_base 6: mod_base = OTHER; note = 2'Fluoro-adenosine
  modified_base 7: mod_base = gm
  modified_base 8: mod_base = OTHER; note = 2' Fluoro-guanosine
  modified_base 9: mod_base = OTHER; note = 2' Fluoro-guanosine
  modified_base 10: mod_base = cm
  modified_base 11: mod_base = OTHER; note = 2'O-methyl-adenosine
  modified_base 12: mod_base = gm
  modified_base 13: mod_base = um
  modified_base 14: mod_base = OTHER; note = 2' Fluoro-uridine
  modified_base 15: mod_base = um
  modified_base 16: mod_base = OTHER; note = 2' Fluoro-guanosine
  modified_base 17: mod_base = OTHER; note = 2'O-methyl-adenosine
  modified_base 18: mod_base = gm
  modified_base 19: mod_base = gm
  modified_base 20: mod_base = OTHER; note = 2'O-methyl-adenosine
  modified_base 21: mod_base = cm
  modified_base 22: mod_base = OTHER; note = 2'O-methyl-adenosine
  modified_base 23: mod_base = um
  modified_base 1^2: mod_base = OTHER; note = phosphorothioate linkage
  modified_base 2^3: mod_base = OTHER; note = phosphorothioate linkage
  modified_base 21^22: mod_base = OTHER; note = phosphorothioate linkage
  modified_base 22^23: mod_base = OTHER; note = phosphorothioate linkage
ttggtagggcagtttgaggacat

SEQ ID NO: 418 - RNA, 23 nt, synthetic construct
  source 1..23: mol_type = other RNA
  misc_feature 1..23: note = Antisense: ETXS744; corresponding to SEQ ID NO: 178
  modified_base 1: mod_base = cm
  modified_base 2: mod_base = OTHER; note = 2' Fluoro-uridine
  modified_base 3: mod_base = um
  modified_base 4: mod_base = gm
  modified_base 5: mod_base = um
  modified_base 6: mod_base = OTHER; note = 2' Fluoro-cytidine
  modified_base 7: mod_base = cm
  modified_base 8: mod_base = OTHER; note = 2'Fluoro-adenosine
  modified_base 9: mod_base = OTHER; note = 2' Fluoro-guanosine
  modified_base 10: mod_base = gm
  modified_base 11: mod_base = um
  modified_base 12: mod_base = gm
  modified_base 13: mod_base = gm
  modified_base 14: mod_base = OTHER; note = 2'Fluoro-adenosine
  modified_base 15: mod_base = OTHER; note = 2'O-methyl-adenosine
  modified_base 16: mod_base = OTHER; note = 2'Fluoro-adenosine
  modified_base 17: mod_base = gm
  modified_base 18: mod_base = um
  modified_base 19: mod_base = gm
  modified_base 20: mod_base = um
  modified_base 21: mod_base = cm
  modified_base 22: mod_base = gm
  modified_base 23: mod_base = OTHER; note = 2'O-methyl-adenosine
  modified_base 1^2: mod_base = OTHER; note = phosphorothioate linkage
  modified_base 2^3: mod_base = OTHER; note = phosphorothioate linkage
  modified_base 21^22: mod_base = OTHER; note = phosphorothioate linkage
  modified_base 22^23: mod_base = OTHER; note = phosphorothioate linkage
cttgtccaggtggaaagtgtcga

SEQ ID NO: 419 - RNA, 23 nt, synthetic construct
  source 1..23: mol_type = other RNA
  misc_feature 1..23: note = Antisense: ETXS746; corresponding to SEQ ID NO: 179
  modified_base 1: mod_base = cm
  modified_base 2: mod_base = OTHER; note = 2' Fluoro-uridine
  modified_base 3: mod_base = um
  modified_base 4: mod_base = gm
  modified_base 5: mod_base = um
  modified_base 6: mod_base = OTHER; note = 2' Fluoro-cytidine
  modified_base 7: mod_base = OTHER; note = 2'O-methyl-adenosine
  modified_base 8: mod_base = OTHER; note = 2'Fluoro-adenosine
  modified_base 9: mod_base = OTHER; note = 2'Fluoro-adenosine
  modified_base 10: mod_base = gm
  modified_base 11: mod_base = gm
  modified_base 12: mod_base = um
  modified_base 13: mod_base = gm
  modified_base 14: mod_base = OTHER; note = 2' Fluoro-guanosine
  modified_base 15: mod_base = OTHER; note = 2'O-methyl-adenosine
  modified_base 16: mod_base = OTHER; note = 2' Fluoro-guanosine
  modified_base 17: mod_base = gm
  modified_base 18: mod_base = cm
  modified_base 19: mod_base = OTHER; note = 2'O-methyl-adenosine
  modified_base 20: mod_base = OTHER; note = 2'O-methyl-adenosine
  modified_base 21: mod_base = OTHER; note = 2'O-methyl-adenosine
  modified_base 22: mod_base = cm
  modified_base 23: mod_base = um
  modified_base 1^2: mod_base = OTHER; note = phosphorothioate linkage
  modified_base 2^3: mod_base = OTHER; note = phosphorothioate linkage
  modified_base 21^22: mod_base = OTHER; note = phosphorothioate linkage
  modified_base 22^23: mod_base = OTHER; note = phosphorothioate linkage
cttgtcaaaggtggaggcaaact

SEQ ID NO: 420 - RNA, 23 nt, synthetic construct
  source 1..23: mol_type = other RNA
  misc_feature 1..23: note = Antisense: ETXS748; corresponding to SEQ ID NO: 180
  modified_base 1: mod_base = OTHER; note = 2'O-methyl-adenosine
  modified_base 2: mod_base = OTHER; note = 2' Fluoro-cytidine
  modified_base 3: mod_base = um
  modified_base 4: mod_base = um
  modified_base 5: mod_base = gm
  modified_base 6: mod_base = OTHER; note = 2' Fluoro-uridine
  modified_base 7: mod_base = cm
  modified_base 8: mod_base = OTHER; note = 2' Fluoro-cytidine
  modified_base 9: mod_base = OTHER; note = 2'Fluoro-adenosine
  modified_base 10: mod_base = gm
  modified_base 11: mod_base = gm
  modified_base 12: mod_base = um
  modified_base 13: mod_base = gm
  modified_base 14: mod_base = OTHER; note = 2' Fluoro-guanosine
  modified_base 15: mod_base = OTHER; note = 2'O-methyl-adenosine
  modified_base 16: mod_base = OTHER; note = 2'Fluoro-adenosine
  modified_base 17: mod_base = OTHER; note = 2'O-methyl-adenosine
  modified_base 18: mod_base = gm
  modified_base 19: mod_base = um
  modified_base 20: mod_base = gm
  modified_base 21: mod_base = um
  modified_base 22: mod_base = cm
  modified_base 23: mod_base = gm
  modified_base 1^2: mod_base = OTHER; note = phosphorothioate linkage
  modified_base 2^3: mod_base = OTHER; note = phosphorothioate linkage
  modified_base 21^22: mod_base = OTHER; note = phosphorothioate linkage
  modified_base 22^23: mod_base = OTHER; note = phosphorothioate linkage
acttgtccaggtggaaagtgtcg

SEQ ID NO: 421 - RNA, 23 nt, synthetic construct
  source 1..23: mol_type = other RNA
  misc_feature 1..23: note = Antisense: ETXS750; corresponding to SEQ ID NO: 181
  modified_base 1: mod_base = cm
  modified_base 2: mod_base = OTHER; note = 2' Fluoro-uridine
  modified_base 3: mod_base = um
  modified_base 4: mod_base = gm
  modified_base 5: mod_base = um
  modified_base 6: mod_base = OTHER; note = 2'Fluoro-adenosine
  modified_base 7: mod_base = cm
  modified_base 8: mod_base = OTHER; note = 2' Fluoro-uridine
  modified_base 9: mod_base = OTHER; note = 2' Fluoro-uridine
  modified_base 10: mod_base = gm
  modified_base 11: mod_base = um
  modified_base 12: mod_base = cm
  modified_base 13: mod_base = cm
  modified_base 14: mod_base = OTHER; note = 2'Fluoro-adenosine
  modified_base 15: mod_base = gm
  modified_base 16: mod_base = OTHER; note = 2' Fluoro-guanosine
  modified_base 17: mod_base = um
  modified_base 18: mod_base = gm
  modified_base 19: mod_base = gm
  modified_base 20: mod_base = OTHER; note = 2'O-methyl-adenosine
  modified_base 21: mod_base = OTHER; note = 2'O-methyl-adenosine
  modified_base 22: mod_base = OTHER; note = 2'O-methyl-adenosine
  modified_base 23: mod_base = gm
  modified_base 1^2: mod_base = OTHER; note = phosphorothioate linkage
  modified_base 2^3: mod_base = OTHER; note = phosphorothioate linkage
  modified_base 21^22: mod_base = OTHER; note = phosphorothioate linkage
  modified_base 22^23: mod_base = OTHER; note = phosphorothioate linkage
cttgtacttgtccaggtggaaag

SEQ ID NO: 422 - RNA, 23 nt, synthetic construct
  source 1..23: mol_type = other RNA
  misc_feature 1..23: note = Antisense: ETXS752; corresponding to SEQ ID NO: 182
  modified_base 1: mod_base = um
  modified_base 2: mod_base = OTHER; note = 2' Fluoro-guanosine
  modified_base 3: mod_base = um
  modified_base 4: mod_base = OTHER; note = 2'O-methyl-adenosine
  modified_base 5: mod_base = cm
  modified_base 6: mod_base = OTHER; note = 2' Fluoro-uridine
  modified_base 7: mod_base = um
  modified_base 8: mod_base = OTHER; note = 2' Fluoro-guanosine
  modified_base 9: mod_base = OTHER; note = 2' Fluoro-uridine
  modified_base 10: mod_base = cm
  modified_base 11: mod_base = cm
  modified_base 12: mod_base = OTHER; note = 2'O-methyl-adenosine
  modified_base 13: mod_base = gm
  modified_base 14: mod_base = OTHER; note = 2' Fluoro-guanosine
  modified_base 15: mod_base = um
  modified_base 16: mod_base = OTHER; note = 2' Fluoro-guanosine
  modified_base 17: mod_base = gm
  modified_base 18: mod_base = OTHER; note = 2'O-methyl-adenosine
  modified_base 19: mod_base = OTHER; note = 2'O-methyl-adenosine
  modified_base 20: mod_base = OTHER; note = 2'O-methyl-adenosine
  modified_base 21: mod_base = gm
  modified_base 22: mod_base = um
  modified_base 23: mod_base = gm
  modified_base 1^2: mod_base = OTHER; note = phosphorothioate linkage
  modified_base 2^3: mod_base = OTHER; note = phosphorothioate linkage
  modified_base 21^22: mod_base = OTHER; note = phosphorothioate linkage
  modified_base 22^23: mod_base = OTHER; note = phosphorothioate linkage
tgtacttgtccaggtggaaagtg

SEQ ID NO: 423 - RNA, 23 nt, synthetic construct
  source 1..23: mol_type = other RNA
  misc_feature 1..23: note = Antisense: ETXS754; corresponding to SEQ ID NO: 183
  modified_base 1: mod_base = um
  modified_base 2: mod_base = OTHER; note = 2' Fluoro-cytidine
  modified_base 3: mod_base = cm
  modified_base 4: mod_base = um
  modified_base 5: mod_base = um
  modified_base 6: mod_base = OTHER; note = 2' Fluoro-guanosine
  modified_base 7: mod_base = gm
  modified_base 8: mod_base = OTHER; note = 2' Fluoro-uridine
  modified_base 9: mod_base = OTHER; note = 2'Fluoro-adenosine
  modified_base 10: mod_base = gm
  modified_base 11: mod_base = gm
  modified_base 12: mod_base = gm
  modified_base 13: mod_base = cm
  modified_base 14: mod_base = OTHER; note = 2'Fluoro-adenosine
  modified_base 15: mod_base = gm
  modified_base 16: mod_base = OTHER; note = 2' Fluoro-uridine
  modified_base 17: mod_base = um
  modified_base 18: mod_base = um
  modified_base 19: mod_base = gm
  modified_base 20: mod_base = OTHER; note = 2'O-methyl-adenosine
  modified_base 21: mod_base = gm
  modified_base 22: mod_base = gm
  modified_base 23: mod_base = OTHER; note = 2'O-methyl-adenosine
  modified_base 1^2: mod_base = OTHER; note = phosphorothioate linkage
  modified_base 2^3: mod_base = OTHER; note = phosphorothioate linkage
  modified_base 21^22: mod_base = OTHER; note = phosphorothioate linkage
  modified_base 22^23: mod_base = OTHER; note = phosphorothioate linkage
tccttggtagggcagtttgagga

SEQ ID NO: 424 - RNA, 23 nt, synthetic construct
  source 1..23: mol_type = other RNA
  misc_feature 1..23: note = Antisense: ETXS756; corresponding to SEQ ID NO: 184
  modified_base 1: mod_base = um
  modified_base 2: mod_base = OTHER; note = 2' Fluoro-uridine
  modified_base 3: mod_base = cm
  modified_base 4: mod_base = cm
  modified_base 5: mod_base = cm
  modified_base 6: mod_base = OTHER; note = 2' Fluoro-uridine
  modified_base 7: mod_base = um
  modified_base 8: mod_base = OTHER; note = 2' Fluoro-uridine
  modified_base 9: mod_base = OTHER; note = 2' Fluoro-guanosine
  modified_base 10: mod_base = OTHER; note = 2'O-methyl-adenosine
  modified_base 11: mod_base = OTHER; note = 2'O-methyl-adenosine
  modified_base 12: mod_base = cm
  modified_base 13: mod_base = OTHER; note = 2'O-methyl-adenosine
  modified_base 14: mod_base = OTHER; note = 2'Fluoro-adenosine
  modified_base 15: mod_base = gm
  modified_base 16: mod_base = OTHER; note = 2'Fluoro-adenosine
  modified_base 17: mod_base = um
  modified_base 18: mod_base = gm
  modified_base 19: mod_base = um
  modified_base 20: mod_base = OTHER; note = 2'O-methyl-adenosine
  modified_base 21: mod_base = OTHER; note = 2'O-methyl-adenosine
  modified_base 22: mod_base = um
  modified_base 23: mod_base = cm
  modified_base 1^2: mod_base = OTHER; note = phosphorothioate linkage
  modified_base 2^3: mod_base = OTHER; note = phosphorothioate linkage
  modified_base 21^22: mod_base = OTHER; note = phosphorothioate linkage
  modified_base 22^23: mod_base = OTHER; note = phosphorothioate linkage
ttccctttgaacaagatgtaatc

SEQ ID NO: 425 - RNA, 23 nt, synthetic construct
  source 1..23: mol_type = other RNA
  misc_feature 1..23: note = Antisense: ETXS758; corresponding to SEQ ID NO: 185
  modified_base 1: mod_base = OTHER; note = 2'O-methyl-adenosine
  modified_base 2: mod_base = OTHER; note = 2' Fluoro-guanosine
  modified_base 3: mod_base = gm
  modified_base 4: mod_base = OTHER; note = 2'O-methyl-adenosine
  modified_base 5: mod_base = cm
  modified_base 6: mod_base = OTHER; note = 2' Fluoro-cytidine
  modified_base 7: mod_base = OTHER; note = 2'O-methyl-adenosine
  modified_base 8: mod_base = OTHER; note = 2' Fluoro-cytidine
  modified_base 9: mod_base = OTHER; note = 2' Fluoro-cytidine
  modified_base 10: mod_base = OTHER; note = 2'O-methyl-adenosine
  modified_base 11: mod_base = gm
  modified_base 12: mod_base = cm
  modified_base 13: mod_base = OTHER; note = 2'O-methyl-adenosine
  modified_base 14: mod_base = OTHER; note = 2' Fluoro-uridine
  modified_base 15: mod_base = gm
  modified_base 16: mod_base = OTHER; note = 2' Fluoro-guanosine
  modified_base 17: mod_base = um
  modified_base 18: mod_base = gm
  modified_base 19: mod_base = gm
  modified_base 20: mod_base = cm
  modified_base 21: mod_base = OTHER; note = 2'O-methyl-adenosine
  modified_base 22: mod_base = um
  modified_base 23: mod_base = um
  modified_base 1^2: mod_base = OTHER; note = phosphorothioate linkage
  modified_base 2^3: mod_base = OTHER; note = phosphorothioate linkage
  modified_base 21^22: mod_base = OTHER; note = phosphorothioate linkage
  modified_base 22^23: mod_base = OTHER; note = phosphorothioate linkage
aggaccaccagcatggtggcatt

SEQ ID NO: 426 - RNA, 23 nt, synthetic construct
  source 1..23: mol_type = other RNA
  misc_feature 1..23: note = Antisense: ETXS760; corresponding to SEQ ID NO: 186
  modified_base 1: mod_base = um
  modified_base 2: mod_base = OTHER; note = 2'Fluoro-adenosine
  modified_base 3: mod_base = um
  modified_base 4: mod_base = cm
  modified_base 5: mod_base = OTHER; note = 2'O-methyl-adenosine
  modified_base 6: mod_base = OTHER; note = 2'Fluoro-adenosine
  modified_base 7: mod_base = OTHER; note = 2'O-methyl-adenosine
  modified_base 8: mod_base = OTHER; note = 2'Fluoro-adenosine
  modified_base 9: mod_base = OTHER; note = 2' Fluoro-uridine
  modified_base 10: mod_base = OTHER; note = 2'O-methyl-adenosine
  modified_base 11: mod_base = cm
  modified_base 12: mod_base = cm
  modified_base 13: mod_base = um
  modified_base 14: mod_base = OTHER; note = 2' Fluoro-cytidine
  modified_base 15: mod_base = um
  modified_base 16: mod_base = OTHER; note = 2' Fluoro-uridine
  modified_base 17: mod_base = gm
  modified_base 18: mod_base = gm
  modified_base 19: mod_base = OTHER; note = 2'O-methyl-adenosine
  modified_base 20: mod_base = um
  modified_base 21: mod_base = OTHER; note = 2'O-methyl-adenosine
  modified_base 22: mod_base = OTHER; note = 2'O-methyl-adenosine
  modified_base 23: mod_base = OTHER; note = 2'O-methyl-adenosine
  modified_base 1^2: mod_base = OTHER; note = phosphorothioate linkage
  modified_base 2^3: mod_base = OTHER; note = phosphorothioate linkage
  modified_base 21^22: mod_base = OTHER; note = phosphorothioate linkage
  modified_base 22^23: mod_base = OTHER; note = phosphorothioate linkage
tatcaaaatacctcttggataaa

SEQ ID NO: 427 - RNA, 23 nt, synthetic construct
  source 1..23: mol_type = other RNA
  misc_feature 1..23: note = Antisense: ETXS762; corresponding to SEQ ID NO: 187
  modified_base 1: mod_base = OTHER; note = 2'O-methyl-adenosine
  modified_base 2: mod_base = OTHER; note = 2' Fluoro-cytidine
  modified_base 3: mod_base = cm
  modified_base 4: mod_base = OTHER; note = 2'O-methyl-adenosine
  modified_base 5: mod_base = cm
  modified_base 6: mod_base = OTHER; note = 2' Fluoro-cytidine
  modified_base 7: mod_base = OTHER; note = 2'O-methyl-adenosine
  modified_base 8: mod_base = OTHER; note = 2' Fluoro-guanosine
  modified_base 9: mod_base = OTHER; note = 2' Fluoro-cytidine
  modified_base 10: mod_base = OTHER; note = 2'O-methyl-adenosine
  modified_base 11: mod_base = um
  modified_base 12: mod_base = gm
  modified_base 13: mod_base = gm
  modified_base 14: mod_base = OTHER; note = 2' Fluoro-uridine
  modified_base 15: mod_base = gm
  modified_base 16: mod_base = OTHER; note = 2' Fluoro-guanosine
  modified_base 17: mod_base = cm
  modified_base 18: mod_base = OTHER; note = 2'O-methyl-adenosine
  modified_base 19: mod_base = um
  modified_base 20: mod_base = um
  modified_base 21: mod_base = um
  modified_base 22: mod_base = cm
  modified_base 23: mod_base = cm
  modified_base 1^2: mod_base = OTHER; note = phosphorothioate linkage
  modified_base 2^3: mod_base = OTHER; note = phosphorothioate linkage
  modified_base 21^22: mod_base = OTHER; note = phosphorothioate linkage
  modified_base 22^23: mod_base = OTHER; note = phosphorothioate linkage
accaccagcatggtggcatttcc

SEQ ID NO: 428 - RNA, 23 nt, synthetic construct
  source 1..23: mol_type = other RNA
  misc_feature 1..23: note = Antisense: ETXS764; corresponding to SEQ ID NO: 188
  modified_base 1: mod_base = um
  modified_base 2: mod_base = OTHER; note = 2' Fluoro-cytidine
  modified_base 3: mod_base = cm
  modified_base 4: mod_base = cm
  modified_base 5: mod_base = um
  modified_base 6: mod_base = OTHER; note = 2' Fluoro-uridine
  modified_base 7: mod_base = um
  modified_base 8: mod_base = OTHER; note = 2' Fluoro-guanosine
  modified_base 9: mod_base = OTHER; note = 2'Fluoro-adenosine
  modified_base 10: mod_base = OTHER; note = 2'O-methyl-adenosine
  modified_base 11: mod_base = cm
  modified_base 12: mod_base = OTHER; note = 2'O-methyl-adenosine
  modified_base 13: mod_base = OTHER; note = 2'O-methyl-adenosine
  modified_base 14: mod_base = OTHER; note = 2' Fluoro-guanosine
  modified_base 15: mod_base = OTHER; note = 2'O-methyl-adenosine
  modified_base 16: mod_base = OTHER; note = 2' Fluoro-uridine
  modified_base 17: mod_base = gm
  modified_base 18: mod_base = um
  modified_base 19: mod_base = OTHER; note = 2'O-methyl-adenosine
  modified_base 20: mod_base = OTHER; note = 2'O-methyl-adenosine
  modified_base 21: mod_base = um
  modified_base 22: mod_base = cm
  modified_base 23: mod_base = cm
  modified_base 1^2: mod_base = OTHER; note = phosphorothioate linkage
  modified_base 2^3: mod_base = OTHER; note = phosphorothioate linkage
  modified_base 21^22: mod_base = OTHER; note = phosphorothioate linkage
  modified_base 22^23: mod_base = OTHER; note = phosphorothioate linkage
tccctttgaacaagatgtaatcc

SEQ ID NO: 429 - RNA, 23 nt, synthetic construct
  source 1..23: mol_type = other RNA
  misc_feature 1..23: note = Antisense: ETXS766; corresponding to SEQ ID NO: 189
  modified_base 1: mod_base = um
  modified_base 2: mod_base = OTHER; note = 2' Fluoro-uridine
  modified_base 3: mod_base = gm
  modified_base 4: mod_base = cm
  modified_base 5: mod_base = cm
  modified_base 6: mod_base = OTHER; note = 2'Fluoro-adenosine
  modified_base 7: mod_base = um
  modified_base 8: mod_base = OTHER; note = 2' Fluoro-cytidine
  modified_base 9: mod_base = OTHER; note = 2' Fluoro-guanosine
  modified_base 10: mod_base = um
  modified_base 11: mod_base = gm
  modified_base 12: mod_base = cm
  modified_base 13: mod_base = cm
  modified_base 14: mod_base = OTHER; note = 2' Fluoro-uridine
  modified_base 15: mod_base = cm
  modified_base 16: mod_base = OTHER; note = 2'Fluoro-adenosine
  modified_base 17: mod_base = um
  modified_base 18: mod_base = gm
  modified_base 19: mod_base = gm
  modified_base 20: mod_base = OTHER; note = 2'O-methyl-adenosine
  modified_base 21: mod_base = gm
  modified_base 22: mod_base = OTHER; note = 2'O-methyl-adenosine
  modified_base 23: mod_base = um
  modified_base 1^2: mod_base = OTHER; note = phosphorothioate linkage
  modified_base 2^3: mod_base = OTHER; note = phosphorothioate linkage
  modified_base 21^22: mod_base = OTHER; note = phosphorothioate linkage
  modified_base 22^23: mod_base = OTHER; note = phosphorothioate linkage
ttgccatcgtgcctcatggagat

SEQ ID NO: 430 - RNA, 23 nt, synthetic construct
  source 1..23: mol_type = other RNA
  misc_feature 1..23: note = Antisense: ETXS768; corresponding to SEQ ID NO: 190
  modified_base 1: mod_base = um
  modified_base 2: mod_base = OTHER; note = 2' Fluoro-uridine
  modified_base 3: mod_base = um
  modified_base 4: mod_base = gm
  modified_base 5: mod_base = OTHER; note = 2'O-methyl-adenosine
  modified_base 6: mod_base = OTHER; note = 2' Fluoro-uridine
  modified_base 7: mod_base = gm
  modified_base 8: mod_base = OTHER; note = 2'Fluoro-adenosine
  modified_base 9: mod_base = OTHER; note = 2' Fluoro-cytidine
  modified_base 10: mod_base = OTHER; note = 2'O-methyl-adenosine
  modified_base 11: mod_base = gm
  modified_base 12: mod_base = gm
  modified_base 13: mod_base = OTHER; note = 2'O-methyl-adenosine
  modified_base 14: mod_base = OTHER; note = 2' Fluoro-guanosine
  modified_base 15: mod_base = gm
  modified_base 16: mod_base = OTHER; note = 2' Fluoro-cytidine
  modified_base 17: mod_base = OTHER; note = 2'O-methyl-adenosine
  modified_base 18: mod_base = um
  modified_base 19: mod_base = gm
  modified_base 20: mod_base = gm
  modified_base 21: mod_base = OTHER; note = 2'O-methyl-adenosine
  modified_base 22: mod_base = OTHER; note = 2'O-methyl-adenosine
  modified_base 23: mod_base = um
  modified_base 1^2: mod_base = OTHER; note = phosphorothioate linkage
  modified_base 2^3: mod_base = OTHER; note = phosphorothioate linkage
  modified_base 21^22: mod_base = OTHER; note = phosphorothioate linkage
  modified_base 22^23: mod_base = OTHER; note = phosphorothioate linkage
tttgatgacaggaggcatggaat

SEQ ID NO: 431 - RNA, 23 nt, synthetic construct
  source 1..23: mol_type = other RNA
  misc_feature 1..23: note = Antisense: ETXS770; corresponding to SEQ ID NO: 191
  modified_base 1: mod_base = um
  modified_base 2: mod_base = OTHER; note = 2' Fluoro-guanosine
  modified_base 3: mod_base = OTHER; note = 2'O-methyl-adenosine
  modified_base 4: mod_base = um
  modified_base 5: mod_base = gm
  modified_base 6: mod_base = OTHER; note = 2'Fluoro-adenosine
  modified_base 7: mod_base = cm
  modified_base 8: mod_base = OTHER; note = 2'Fluoro-adenosine
  modified_base 9: mod_base = OTHER; note = 2' Fluoro-guanosine
  modified_base 10: mod_base = gm
  modified_base 11: mod_base = OTHER; note = 2'O-methyl-adenosine
  modified_base 12: mod_base = gm
  modified_base 13: mod_base = gm
  modified_base 14: mod_base = OTHER; note = 2' Fluoro-cytidine
  modified_base 15: mod_base = OTHER; note = 2'O-methyl-adenosine
  modified_base 16: mod_base = OTHER; note = 2' Fluoro-uridine
  modified_base 17: mod_base = gm
  modified_base 18: mod_base = gm
  modified_base 19: mod_base = OTHER; note = 2'O-methyl-adenosine
  modified_base 20: mod_base = OTHER; note = 2'O-methyl-adenosine
  modified_base 21: mod_base = um
  modified_base 22: mod_base = OTHER; note = 2'O-methyl-adenosine
  modified_base 23: mod_base = OTHER; note = 2'O-methyl-adenosine
  modified_base 1^2: mod_base = OTHER; note = phosphorothioate linkage
  modified_base 2^3: mod_base = OTHER; note = phosphorothioate linkage
  modified_base 21^22: mod_base = OTHER; note = phosphorothioate linkage
  modified_base 22^23: mod_base = OTHER; note = phosphorothioate linkage
tgatgacaggaggcatggaataa

SEQ ID NO: 432 - RNA, 23 nt, synthetic construct
  source 1..23: mol_type = other RNA
  misc_feature 1..23: note = Antisense: ETXS772; corresponding to SEQ ID NO: 192
  modified_base 1: mod_base = cm
  modified_base 2: mod_base = OTHER; note = 2'Fluoro-adenosine
  modified_base 3: mod_base = gm
  modified_base 4: mod_base = cm
  modified_base 5: mod_base = OTHER; note = 2'O-methyl-adenosine
  modified_base 6: mod_base = OTHER; note = 2' Fluoro-uridine
  modified_base 7: mod_base = gm
  modified_base 8: mod_base = OTHER; note = 2' Fluoro-guanosine
  modified_base 9: mod_base = OTHER; note = 2' Fluoro-uridine
  modified_base 10: mod_base = gm
  modified_base 11: mod_base = gm
  modified_base 12: mod_base = cm
  modified_base 13: mod_base = OTHER; note = 2'O-methyl-adenosine
  modified_base 14: mod_base = OTHER; note = 2' Fluoro-uridine
  modified_base 15: mod_base = um
  modified_base 16: mod_base = OTHER; note = 2' Fluoro-uridine
  modified_base 17: mod_base = cm
  modified_base 18: mod_base = cm
  modified_base 19: mod_base = um
  modified_base 20: mod_base = um
  modified_base 21: mod_base = gm
  modified_base 22: mod_base = gm
  modified_base 23: mod_base = um
  modified_base 1^2: mod_base = OTHER; note = phosphorothioate linkage
  modified_base 2^3: mod_base = OTHER; note = phosphorothioate linkage
  modified_base 21^22: mod_base = OTHER; note = phosphorothioate linkage
  modified_base 22^23: mod_base = OTHER; note = phosphorothioate linkage
cagcatggtggcatttccttggt

SEQ ID NO: 433 - RNA, 23 nt, synthetic construct
  source 1..23: mol_type = other RNA
  misc_feature 1..23: note = Antisense: ETXS774; corresponding to SEQ ID NO: 193
  modified_base 1: mod_base = um
  modified_base 2: mod_base = OTHER; note = 2' Fluoro-uridine
  modified_base 3: mod_base = um
  modified_base 4: mod_base = um
  modified_base 5: mod_base = cm
  modified_base 6: mod_base = OTHER; note = 2' Fluoro-uridine
  modified_base 7: mod_base = cm
  modified_base 8: mod_base = OTHER; note = 2' Fluoro-cytidine
  modified_base 9: mod_base = OTHER; note = 2'Fluoro-adenosine
  modified_base 10: mod_base = um
  modified_base 11: mod_base = gm
  modified_base 12: mod_base = OTHER; note = 2'O-methyl-adenosine
  modified_base 13: mod_base = gm
  modified_base 14: mod_base = OTHER; note = 2' Fluoro-guanosine
  modified_base 15: mod_base = OTHER; note = 2'O-methyl-adenosine
  modified_base 16: mod_base = OTHER; note = 2' Fluoro-cytidine
  modified_base 17: mod_base = cm
  modified_base 18: mod_base = OTHER; note = 2'O-methyl-adenosine
  modified_base 19: mod_base = cm
  modified_base 20: mod_base = cm
  modified_base 21: mod_base = OTHER; note = 2'O-methyl-adenosine
  modified_base 22: mod_base = gm
  modified_base 23: mod_base = cm
  modified_base 1^2: mod_base = OTHER; note = phosphorothioate linkage
  modified_base 2^3: mod_base = OTHER; note = phosphorothioate linkage
  modified_base 21^22: mod_base = OTHER; note = phosphorothioate linkage
  modified_base 22^23: mod_base = OTHER; note = phosphorothioate linkage
ttttctccatgaggaccaccagc

SEQ ID NO: 434 - RNA, 23 nt, synthetic construct
  source 1..23: mol_type = other RNA
  misc_feature 1..23: note = Antisense: ETXS776; corresponding to SEQ ID NO: 194
  modified_base 1: mod_base = cm
  modified_base 2: mod_base = OTHER; note = 2' Fluoro-cytidine
  modified_base 3: mod_base = OTHER; note = 2'O-methyl-adenosine
  modified_base 4: mod_base = um
  modified_base 5: mod_base = um
  modified_base 6: mod_base = OTHER; note = 2' Fluoro-uridine
  modified_base 7: mod_base = cm
  modified_base 8: mod_base = OTHER; note = 2' Fluoro-cytidine
  modified_base 9: mod_base = OTHER; note = 2' Fluoro-cytidine
  modified_base 10: mod_base = um
  modified_base 11: mod_base = um
  modified_base 12: mod_base = um
  modified_base 13: mod_base = gm
  modified_base 14: mod_base = OTHER; note = 2'Fluoro-adenosine
  modified_base 15: mod_base = OTHER; note = 2'O-methyl-adenosine
  modified_base 16: mod_base = OTHER; note = 2' Fluoro-cytidine
  modified_base 17: mod_base = OTHER; note = 2'O-methyl-adenosine
  modified_base 18: mod_base = OTHER; note = 2'O-methyl-adenosine
  modified_base 19: mod_base = gm
  modified_base 20: mod_base = OTHER; note = 2'O-methyl-adenosine
  modified_base 21: mod_base = um
  modified_base 22: mod_base = gm
  modified_base 23: mod_base = um
  modified_base 1^2: mod_base = OTHER; note = phosphorothioate linkage
  modified_base 2^3: mod_base = OTHER; note = phosphorothioate linkage
  modified_base 21^22: mod_base = OTHER; note = phosphorothioate linkage
  modified_base 22^23: mod_base = OTHER; note = phosphorothioate linkage
ccatttccctttgaacaagatgt

SEQ ID NO: 435 - RNA, 23 nt, synthetic construct
  source 1..23: mol_type = other RNA
  misc_feature 1..23: note = Antisense: ETXS778; corresponding to SEQ ID NO: 195
  modified_base 1: mod_base = cm
  modified_base 2: mod_base = OTHER; note = 2' Fluoro-cytidine
  modified_base 3: mod_base = OTHER; note = 2'O-methyl-adenosine
  modified_base 4: mod_base = gm
  modified_base 5: mod_base = cm
  modified_base 6: mod_base = OTHER; note = 2'Fluoro-adenosine
  modified_base 7: mod_base = um
  modified_base 8: mod_base = OTHER; note = 2' Fluoro-guanosine
  modified_base 9: mod_base = OTHER; note = 2' Fluoro-guanosine
  modified_base 10: mod_base = um
  modified_base 11: mod_base = gm
  modified_base 12: mod_base = gm
  modified_base 13: mod_base = cm
  modified_base 14: mod_base = OTHER; note = 2'Fluoro-adenosine
  modified_base 15: mod_base = um
  modified_base 16: mod_base = OTHER; note = 2' Fluoro-uridine
  modified_base 17: mod_base = um
  modified_base 18: mod_base = cm
  modified_base 19: mod_base = cm
  modified_base 20: mod_base = um
  modified_base 21: mod_base = um
  modified_base 22: mod_base = gm
  modified_base 23: mod_base = gm
  modified_base 1^2: mod_base = OTHER; note = phosphorothioate linkage
  modified_base 2^3: mod_base = OTHER; note = phosphorothioate linkage
  modified_base 21^22: mod_base = OTHER; note = phosphorothioate linkage
  modified_base 22^23: mod_base = OTHER; note = phosphorothioate linkage
ccagcatggtggcatttccttgg

SEQ ID NO: 436 - RNA, 23 nt, synthetic construct
  source 1..23: mol_type = other RNA
  misc_feature 1..23: note = Antisense: ETXS780; corresponding to SEQ ID NO: 196
  modified_base 1: mod_base = OTHER; note = 2'O-methyl-adenosine
  modified_base 2: mod_base = OTHER; note = 2' Fluoro-uridine
  modified_base 3: mod_base = um
  modified_base 4: mod_base = cm
  modified_base 5: mod_base = um
  modified_base 6: mod_base = OTHER; note = 2' Fluoro-uridine
  modified_base 7: mod_base = gm
  modified_base 8: mod_base = OTHER; note = 2' Fluoro-uridine
  modified_base 9: mod_base = OTHER; note = 2' Fluoro-cytidine
  modified_base 10: mod_base = OTHER; note = 2'O-methyl-adenosine
  modified_base 11: mod_base = OTHER; note = 2'O-methyl-adenosine
  modified_base 12: mod_base = OTHER; note = 2'O-methyl-adenosine
  modified_base 13: mod_base = gm
  modified_base 14: mod_base = OTHER; note = 2' Fluoro-guanosine
  modified_base 15: mod_base = um
  modified_base 16: mod_base = OTHER; note = 2' Fluoro-guanosine
  modified_base 17: mod_base = gm
  modified_base 18: mod_base = OTHER; note = 2'O-methyl-adenosine
  modified_base 19: mod_base = gm
  modified_base 20: mod_base = gm
  modified_base 21: mod_base = cm
  modified_base 22: mod_base = OTHER; note = 2'O-methyl-adenosine
  modified_base 23: mod_base = OTHER; note = 2'O-methyl-adenosine
  modified_base 1^2: mod_base = OTHER; note = phosphorothioate linkage
  modified_base 2^3: mod_base = OTHER; note = phosphorothioate linkage
  modified_base 21^22: mod_base = OTHER; note = phosphorothioate linkage
  modified_base 22^23: mod_base = OTHER; note = phosphorothioate linkage
attcttgtcaaaggtggaggcaa

SEQ ID NO: 437 - RNA, 23 nt, synthetic construct
  source 1..23: mol_type = other RNA
  misc_feature 1..23: note = Antisense: ETXS782; corresponding to SEQ ID NO: 197
  modified_base 1: mod_base = um
  modified_base 2: mod_base = OTHER; note = 2' Fluoro-uridine
  modified_base 3: mod_base = gm
  modified_base 4: mod_base = um
  modified_base 5: mod_base = gm
  modified_base 6: mod_base = OTHER; note = 2' Fluoro-guanosine
  modified_base 7: mod_base = OTHER; note = 2'O-methyl-adenosine
  modified_base 8: mod_base = OTHER; note = 2' Fluoro-uridine
  modified_base 9: mod_base = OTHER; note = 2' Fluoro-guanosine
  modified_base 10: mod_base = OTHER; note = 2'O-methyl-adenosine
  modified_base 11: mod_base = OTHER; note = 2'O-methyl-adenosine
  modified_base 12: mod_base = gm
  modified_base 13: mod_base = gm
  modified_base 14: mod_base = OTHER; note = 2' Fluoro-cytidine
  modified_base 15: mod_base = OTHER; note = 2'O-methyl-adenosine
  modified_base 16: mod_base = OTHER; note = 2'Fluoro-adenosine
  modified_base 17: mod_base = OTHER; note = 2'O-methyl-adenosine
  modified_base 18: mod_base = OTHER; note = 2'O-methyl-adenosine
  modified_base 19: mod_base = cm
  modified_base 20: mod_base = um
  modified_base 21: mod_base = cm
  modified_base 22: mod_base = cm
  modified_base 23: mod_base = cm
  modified_base 1^2: mod_base = OTHER; note = phosphorothioate linkage
  modified_base 2^3: mod_base = OTHER; note = phosphorothioate linkage
  modified_base 21^22: mod_base = OTHER; note = phosphorothioate linkage
  modified_base 22^23: mod_base = OTHER; note = phosphorothioate linkage
ttgtggatgaaggcaaaactccc

SEQ ID NO: 438 - RNA, 23 nt, synthetic construct
  source 1..23: mol_type = other RNA
  misc_feature 1..23: note = Antisense: ETXS784; corresponding to SEQ ID NO: 198
  modified_base 1: mod_base = cm
  modified_base 2: mod_base = OTHER; note = 2' Fluoro-uridine
  modified_base 3: mod_base = cm
  modified_base 4: mod_base = OTHER; note = 2'O-methyl-adenosine
  modified_base 5: mod_base = um
  modified_base 6: mod_base = OTHER; note = 2' Fluoro-guanosine
  modified_base 7: mod_base = gm
  modified_base 8: mod_base = OTHER; note = 2'Fluoro-adenosine
  modified_base 9: mod_base = OTHER; note = 2' Fluoro-guanosine
  modified_base 10: mod_base = OTHER; note = 2'O-methyl-adenosine
  modified_base 11: mod_base = um
  modified_base 12: mod_base = cm
  modified_base 13: mod_base = um
  modified_base 14: mod_base = OTHER; note = 2' Fluoro-uridine
  modified_base 15: mod_base = um
  modified_base 16: mod_base = OTHER; note = 2' Fluoro-cytidine
  modified_base 17: mod_base = gm
  modified_base 18: mod_base = cm
  modified_base 19: mod_base = OTHER; note = 2'O-methyl-adenosine
  modified_base 20: mod_base = gm
  modified_base 21: mod_base = cm
  modified_base 22: mod_base = OTHER; note = 2'O-methyl-adenosine
  modified_base 23: mod_base = gm
  modified_base 1^2: mod_base = OTHER; note = phosphorothioate linkage
  modified_base 2^3: mod_base = OTHER; note = phosphorothioate linkage
  modified_base 21^22: mod_base = OTHER; note = phosphorothioate linkage
  modified_base 22^23: mod_base = OTHER; note = phosphorothioate linkage
ctcatggagatctttcgcagcag

SEQ ID NO: 439 - RNA, 23 nt, synthetic construct
  source 1..23: mol_type = other RNA
  misc_feature 1..23: note = Antisense: ETXS786; corresponding to SEQ ID NO: 199
  modified_base 1: mod_base = um
  modified_base 2: mod_base = OTHER; note = 2' Fluoro-guanosine
  modified_base 3: mod_base = um
  modified_base 4: mod_base = cm
  modified_base 5: mod_base = OTHER; note = 2'O-methyl-adenosine
  modified_base 6: mod_base = OTHER; note = 2'Fluoro-adenosine
  modified_base 7: mod_base = OTHER; note = 2'O-methyl-adenosine
  modified_base 8: mod_base = OTHER; note = 2' Fluoro-guanosine
  modified_base 9: mod_base = OTHER; note = 2' Fluoro-guanosine
  modified_base 10: mod_base = um
  modified_base 11: mod_base = gm
  modified_base 12: mod_base = gm
  modified_base 13: mod_base = OTHER; note = 2'O-methyl-adenosine
  modified_base 14: mod_base = OTHER; note = 2' Fluoro-guanosine
  modified_base 15: mod_base = gm
  modified_base 16: mod_base = OTHER; note = 2' Fluoro-cytidine
  modified_base 17: mod_base = OTHER; note = 2'O-methyl-adenosine
  modified_base 18: mod_base = OTHER; note = 2'O-methyl-adenosine
  modified_base 19: mod_base = OTHER; note = 2'O-methyl-adenosine
  modified_base 20: mod_base = cm
  modified_base 21: mod_base = um
  modified_base 22: mod_base = um
  modified_base 23: mod_base = gm
  modified_base 1^2: mod_base = OTHER; note = phosphorothioate linkage
  modified_base 2^3: mod_base = OTHER; note = phosphorothioate linkage
  modified_base 21^22: mod_base = OTHER; note = phosphorothioate linkage
  modified_base 22^23: mod_base = OTHER; note = phosphorothioate linkage
tgtcaaaggtggaggcaaacttg

SEQ ID NO: 440 - RNA, 23 nt, synthetic construct
  source 1..23: mol_type = other RNA
  misc_feature 1..23: note = Antisense: ETXS788; corresponding to SEQ ID NO: 200
  modified_base 1: mod_base = um
  modified_base 2: mod_base = OTHER; note = 2' Fluoro-uridine
  modified_base 3: mod_base = gm
  modified_base 4: mod_base = um
  modified_base 5: mod_base = cm
  modified_base 6: mod_base = OTHER; note = 2'Fluoro-adenosine
  modified_base 7: mod_base = OTHER; note = 2'O-methyl-adenosine
  modified_base 8: mod_base = OTHER; note = 2'Fluoro-adenosine
  modified_base 9: mod_base = OTHER; note = 2' Fluoro-guanosine
  modified_base 10: mod_base = gm
  modified_base 11: mod_base = um
  modified_base 12: mod_base = gm
  modified_base 13: mod_base = gm
  modified_base 14: mod_base = OTHER; note = 2'Fluoro-adenosine
  modified_base 15: mod_base = gm
  modified_base 16: mod_base = OTHER; note = 2' Fluoro-guanosine
  modified_base 17: mod_base = cm
  modified_base 18: mod_base = OTHER; note = 2'O-methyl-adenosine
  modified_base 19: mod_base = OTHER; note = 2'O-methyl-adenosine
  modified_base 20: mod_base = OTHER; note = 2'O-methyl-adenosine
  modified_base 21: mod_base = cm
  modified_base 22: mod_base = um
  modified_base 23: mod_base = um
  modified_base 1^2: mod_base = OTHER; note = phosphorothioate linkage
  modified_base 2^3: mod_base = OTHER; note = phosphorothioate linkage
  modified_base 21^22: mod_base = OTHER; note = phosphorothioate linkage
  modified_base 22^23: mod_base = OTHER; note = phosphorothioate linkage
ttgtcaaaggtggaggcaaactt

SEQ ID NO: 441 - RNA, 23 nt, synthetic construct
  source 1..23: mol_type = other RNA
  misc_feature 1..23: note = Antisense: ETXS790; corresponding to SEQ ID NO: 201
  modified_base 1: mod_base = cm
  modified_base 2: mod_base = OTHER; note = 2'Fluoro-adenosine
  modified_base 3: mod_base = um
  modified_base 4: mod_base = um
  modified_base 5: mod_base = um
  modified_base 6: mod_base = OTHER; note = 2' Fluoro-cytidine
  modified_base 7: mod_base = cm
  modified_base 8: mod_base = OTHER; note = 2' Fluoro-cytidine
  modified_base 9: mod_base = OTHER; note = 2' Fluoro-uridine
  modified_base 10: mod_base = um
  modified_base 11: mod_base = um
  modified_base 12: mod_base = gm
  modified_base 13: mod_base = OTHER; note = 2'O-methyl-adenosine
  modified_base 14: mod_base = OTHER; note = 2'Fluoro-adenosine
  modified_base 15: mod_base = cm
  modified_base 16: mod_base = OTHER; note = 2'Fluoro-adenosine
  modified_base 17: mod_base = OTHER; note = 2'O-methyl-adenosine
  modified_base 18: mod_base = gm
  modified_base 19: mod_base = OTHER; note = 2'O-methyl-adenosine
  modified_base 20: mod_base = um
  modified_base 21: mod_base = gm
  modified_base 22: mod_base = um
  modified_base 23: mod_base = OTHER; note = 2'O-methyl-adenosine
  modified_base 1^2: mod_base = OTHER; note = phosphorothioate linkage
  modified_base 2^3: mod_base = OTHER; note = phosphorothioate linkage
  modified_base 21^22: mod_base = OTHER; note = phosphorothioate linkage
  modified_base 22^23: mod_base = OTHER; note = phosphorothioate linkage
catttccctttgaacaagatgta

SEQ ID NO: 442 - RNA, 23 nt, synthetic construct
  source 1..23: mol_type = other RNA
  misc_feature 1..23: note = Antisense: ETXS792; corresponding to SEQ ID NO: 202
  modified_base 1: mod_base = um
  modified_base 2: mod_base = OTHER; note = 2' Fluoro-guanosine
  modified_base 3: mod_base = um
  modified_base 4: mod_base = gm
  modified_base 5: mod_base = gm
  modified_base 6: mod_base = OTHER; note = 2'Fluoro-adenosine
  modified_base 7: mod_base = um
  modified_base 8: mod_base = OTHER; note = 2' Fluoro-guanosine
  modified_base 9: mod_base = OTHER; note = 2'Fluoro-adenosine
  modified_base 10: mod_base = OTHER; note = 2'O-methyl-adenosine
  modified_base 11: mod_base = gm
  modified_base 12: mod_base = gm
  modified_base 13: mod_base = cm
  modified_base 14: mod_base = OTHER; note = 2'Fluoro-adenosine
  modified_base 15: mod_base = OTHER; note = 2'O-methyl-adenosine
  modified_base 16: mod_base = OTHER; note = 2'Fluoro-adenosine
  modified_base 17: mod_base = OTHER; note = 2'O-methyl-adenosine
  modified_base 18: mod_base = cm
  modified_base 19: mod_base = um
  modified_base 20: mod_base = cm
  modified_base 21: mod_base = cm
  modified_base 22: mod_base = cm
  modified_base 23: mod_base = cm
  modified_base 1^2: mod_base = OTHER; note = phosphorothioate linkage
  modified_base 2^3: mod_base = OTHER; note = phosphorothioate linkage
  modified_base 21^22: mod_base = OTHER; note = phosphorothioate linkage
  modified_base 22^23: mod_base = OTHER; note = phosphorothioate linkage
tgtggatgaaggcaaaactcccc

SEQ ID NO: 443 - RNA, 23 nt, synthetic construct
  source 1..23: mol_type = other RNA
  misc_feature 1..23: note = Antisense: ETXS794; corresponding to SEQ ID NO: 203
  modified_base 1: mod_base = cm
  modified_base 2: mod_base = OTHER; note = 2' Fluoro-cytidine
  modified_base 3: mod_base = um
  modified_base 4: mod_base = cm
  modified_base 5: mod_base = OTHER; note = 2'O-methyl-adenosine
  modified_base 6: mod_base = OTHER; note = 2' Fluoro-uridine
  modified_base 7: mod_base = gm
  modified_base 8: mod_base = OTHER; note = 2' Fluoro-guanosine
  modified_base 9: mod_base = OTHER; note = 2'Fluoro-adenosine
  modified_base 10: mod_base = gm
  modified_base 11: mod_base = OTHER; note = 2'O-methyl-adenosine
  modified_base 12: mod_base = um
  modified_base 13: mod_base = cm
  modified_base 14: mod_base = OTHER; note = 2' Fluoro-uridine
  modified_base 15: mod_base = um
  modified_base 16: mod_base = OTHER; note = 2' Fluoro-uridine
  modified_base 17: mod_base = cm
  modified_base 18: mod_base = gm
  modified_base 19: mod_base = cm
  modified_base 20: mod_base = OTHER; note = 2'O-methyl-adenosine
  modified_base 21: mod_base = gm
  modified_base 22: mod_base = cm
  modified_base 23: mod_base = OTHER; note = 2'O-methyl-adenosine
  modified_base 1^2: mod_base = OTHER; note = phosphorothioate linkage
  modified_base 2^3: mod_base = OTHER; note = phosphorothioate linkage
  modified_base 21^22: mod_base = OTHER; note = phosphorothioate linkage
  modified_base 22^23: mod_base = OTHER; note = phosphorothioate linkage
cctcatggagatctttcgcagca

SEQ ID NO: 444 - RNA, 23 nt, synthetic construct
  source 1..23: mol_type = other RNA
  misc_feature 1..23: note = Antisense: ETXS796; corresponding to SEQ ID NO: 204
  modified_base 1: mod_base = cm
  modified_base 2: mod_base = OTHER; note = 2' Fluoro-uridine
  modified_base 3: mod_base = um
  modified_base 4: mod_base = um
  modified_base 5: mod_base = gm
  modified_base 6: mod_base = OTHER; note = 2'Fluoro-adenosine
  modified_base 7: mod_base = um
  modified_base 8: mod_base = OTHER; note = 2' Fluoro-guanosine
  modified_base 9: mod_base = OTHER; note = 2'Fluoro-adenosine
  modified_base 10: mod_base = cm
  modified_base 11: mod_base = OTHER; note = 2'O-methyl-adenosine
  modified_base 12: mod_base = gm
  modified_base 13: mod_base = gm
  modified_base 14: mod_base = OTHER; note = 2'Fluoro-adenosine
  modified_base 15: mod_base = gm
  modified_base 16: mod_base = OTHER; note = 2' Fluoro-guanosine
  modified_base 17: mod_base = cm
  modified_base 18: mod_base = OTHER; note = 2'O-methyl-adenosine
  modified_base 19: mod_base = um
  modified_base 20: mod_base = gm
  modified_base 21: mod_base = gm
  modified_base 22: mod_base = OTHER; note = 2'O-methyl-adenosine
  modified_base 23: mod_base = OTHER; note = 2'O-methyl-adenosine
  modified_base 1^2: mod_base = OTHER; note = phosphorothioate linkage
  modified_base 2^3: mod_base = OTHER; note = phosphorothioate linkage
  modified_base 21^22: mod_base = OTHER; note = phosphorothioate linkage
  modified_base 22^23: mod_base = OTHER; note = phosphorothioate linkage
ctttgatgacaggaggcatggaa

SEQ ID NO: 445 - RNA, 23 nt, synthetic construct
  source 1..23: mol_type = other RNA
  misc_feature 1..23: note = Antisense: ETXS798; corresponding to SEQ ID NO: 205
  modified_base 1: mod_base = um
  modified_base 2: mod_base = OTHER; note = 2' Fluoro-cytidine
  modified_base 3: mod_base = OTHER; note = 2'O-methyl-adenosine
  modified_base 4: mod_base = cm
  modified_base 5: mod_base = cm
  modified_base 6: mod_base = OTHER; note = 2'Fluoro-adenosine
  modified_base 7: mod_base = cm
  modified_base 8: mod_base = OTHER; note = 2' Fluoro-cytidine
  modified_base 9: mod_base = OTHER; note = 2' Fluoro-cytidine
  modified_base 10: mod_base = um
  modified_base 11: mod_base = gm
  modified_base 12: mod_base = cm
  modified_base 13: mod_base = cm
  modified_base 14: mod_base = OTHER; note = 2' Fluoro-cytidine
  modified_base 15: mod_base = OTHER; note = 2'O-methyl-adenosine
  modified_base 16: mod_base = OTHER; note = 2' Fluoro-guanosine
  modified_base 17: mod_base = OTHER; note = 2'O-methyl-adenosine
  modified_base 18: mod_base = OTHER; note = 2'O-methyl-adenosine
  modified_base 19: mod_base = OTHER; note = 2'O-methyl-adenosine
  modified_base 20: mod_base = cm
  modified_base 21: mod_base = OTHER; note = 2'O-methyl-adenosine
  modified_base 22: mod_base = gm
  modified_base 23: mod_base = OTHER; note = 2'O-methyl-adenosine
  modified_base 1^2: mod_base = OTHER; note = phosphorothioate linkage
  modified_base 2^3: mod_base = OTHER; note = phosphorothioate linkage
  modified_base 21^22: mod_base = OTHER; note = phosphorothioate linkage
  modified_base 22^23: mod_base = OTHER; note = phosphorothioate linkage
tcaccaccctgcccagaaacaga

SEQ ID NO: 446 - RNA, 23 nt, synthetic construct
  source 1..23: mol_type = other RNA
  misc_feature 1..23: note = Antisense: ETXS800; corresponding to SEQ ID NO: 206
  modified_base 1: mod_base = um
  modified_base 2: mod_base = OTHER; note = 2' Fluoro-guanosine
  modified_base 3: mod_base = gm
  modified_base 4: mod_base = OTHER; note = 2'O-methyl-adenosine
  modified_base 5: mod_base = gm
  modified_base 6: mod_base = OTHER; note = 2'Fluoro-adenosine
  modified_base 7: mod_base = um
  modified_base 8: mod_base = OTHER; note = 2' Fluoro-cytidine
  modified_base 9: mod_base = OTHER; note = 2' Fluoro-uridine
  modified_base 10: mod_base = um
  modified_base 11: mod_base = um
  modified_base 12: mod_base = cm
  modified_base 13: mod_base = gm
  modified_base 14: mod_base = OTHER; note = 2' Fluoro-cytidine
  modified_base 15: mod_base = OTHER; note = 2'O-methyl-adenosine
  modified_base 16: mod_base = OTHER; note = 2' Fluoro-guanosine
  modified_base 17: mod_base = cm
  modified_base 18: mod_base = OTHER; note = 2'O-methyl-adenosine
  modified_base 19: mod_base = gm
  modified_base 20: mod_base = gm
  modified_base 21: mod_base = cm
  modified_base 22: mod_base = um
  modified_base 23: mod_base = gm
  modified_base 1^2: mod_base = OTHER; note = phosphorothioate linkage
  modified_base 2^3: mod_base = OTHER; note = phosphorothioate linkage
  modified_base 21^22: mod_base = OTHER; note = phosphorothioate linkage
  modified_base 22^23: mod_base = OTHER; note = phosphorothioate linkage
tggagatctttcgcagcaggctg

SEQ ID NO: 447 - RNA, 23 nt, synthetic construct
  source 1..23: mol_type = other RNA
  misc_feature 1..23: note = Antisense: ETXS802; corresponding to SEQ ID NO: 207
  modified_base 1: mod_base = gm
  modified_base 2: mod_base = OTHER; note = 2'Fluoro-adenosine
  modified_base 3: mod_base = um
  modified_base 4: mod_base = um
  modified_base 5: mod_base = OTHER; note = 2'O-methyl-adenosine
  modified_base 6: mod_base = OTHER; note = 2'Fluoro-adenosine
  modified_base 7: mod_base = um
  modified_base 8: mod_base = OTHER; note = 2' Fluoro-cytidine
  modified_base 9: mod_base = OTHER; note = 2' Fluoro-uridine
  modified_base 10: mod_base = cm
  modified_base 11: mod_base = OTHER; note = 2'O-methyl-adenosine
  modified_base 12: mod_base = um
  modified_base 13: mod_base = cm
  modified_base 14: mod_base = OTHER; note = 2'Fluoro-adenosine
  modified_base 15: mod_base = OTHER; note = 2'O-methyl-adenosine
  modified_base 16: mod_base = OTHER; note = 2'Fluoro-adenosine
  modified_base 17: mod_base = cm
  modified_base 18: mod_base = OTHER; note = 2'O-methyl-adenosine
  modified_base 19: mod_base = gm
  modified_base 20: mod_base = um
  modified_base 21: mod_base = um
  modified_base 22: mod_base = um
  modified_base 23: mod_base = gm
  modified_base 1^2: mod_base = OTHER; note = phosphorothioate linkage
  modified_base 2^3: mod_base = OTHER; note = phosphorothioate linkage
  modified_base 21^22: mod_base = OTHER; note = phosphorothioate linkage
  modified_base 22^23: mod_base = OTHER; note = phosphorothioate linkage
gattaatctcatcaaacagtttg

SEQ ID NO: 448 - RNA, 23 nt, synthetic construct
  source 1..23: mol_type = other RNA
  misc_feature 1..23: note = Antisense: ETXS804; corresponding to SEQ ID NO: 208
  modified_base 1: mod_base = cm
  modified_base 2: mod_base = OTHER; note = 2'Fluoro-adenosine
  modified_base 3: mod_base = cm
  modified_base 4: mod_base = um
  modified_base 5: mod_base = um
  modified_base 6: mod_base = OTHER; note = 2' Fluoro-uridine
  modified_base 7: mod_base = gm
  modified_base 8: mod_base = OTHER; note = 2'Fluoro-adenosine
  modified_base 9: mod_base = OTHER; note = 2' Fluoro-uridine
  modified_base 10: mod_base = gm
  modified_base 11: mod_base = OTHER; note = 2'O-methyl-adenosine
  modified_base 12: mod_base = cm
  modified_base 13: mod_base = OTHER; note = 2'O-methyl-adenosine
  modified_base 14: mod_base = OTHER; note = 2' Fluoro-guanosine
  modified_base 15: mod_base = gm
  modified_base 16: mod_base = OTHER; note = 2'Fluoro-adenosine
  modified_base 17: mod_base = gm
  modified_base 18: mod_base = gm
  modified_base 19: mod_base = cm
  modified_base 20: mod_base = OTHER; note = 2'O-methyl-adenosine
  modified_base 21: mod_base = um
  modified_base 22: mod_base = gm
  modified_base 23: mod_base = gm
  modified_base 1^2: mod_base = OTHER; note = phosphorothioate linkage
  modified_base 2^3: mod_base = OTHER; note = phosphorothioate linkage
  modified_base 21^22: mod_base = OTHER; note = phosphorothioate linkage
  modified_base 22^23: mod_base = OTHER; note = phosphorothioate linkage
cactttgatgacaggaggcatgg

SEQ ID NO: 449 - RNA, 23 nt, synthetic construct
  source 1..23: mol_type = other RNA
  misc_feature 1..23: note = Antisense: ETXS806; corresponding to SEQ ID NO: 209
  modified_base 1: mod_base = gm
  modified_base 2: mod_base = OTHER; note = 2' Fluoro-cytidine
  modified_base 3: mod_base = OTHER; note = 2'O-methyl-adenosine
  modified_base 4: mod_base = gm
  modified_base 5: mod_base = cm
  modified_base 6: mod_base = OTHER; note = 2' Fluoro-uridine
  modified_base 7: mod_base = cm
  modified_base 8: mod_base = OTHER; note = 2'Fluoro-adenosine
  modified_base 9: mod_base = OTHER; note = 2' Fluoro-uridine
  modified_base 10: mod_base = gm
  modified_base 11: mod_base = cm
  modified_base 12: mod_base = OTHER; note = 2'O-methyl-adenosine
  modified_base 13: mod_base = um
  modified_base 14: mod_base = OTHER; note = 2' Fluoro-cytidine
  modified_base 15: mod_base = um
  modified_base 16: mod_base = OTHER; note = 2' Fluoro-cytidine
  modified_base 17: mod_base = OTHER; note = 2'O-methyl-adenosine
  modified_base 18: mod_base = um
  modified_base 19: mod_base = OTHER; note = 2'O-methyl-adenosine
  modified_base 20: mod_base = cm
  modified_base 21: mod_base = um
  modified_base 22: mod_base = um
  modified_base 23: mod_base = cm
  modified_base 1^2: mod_base = OTHER; note = phosphorothioate linkage
  modified_base 2^3: mod_base = OTHER; note = phosphorothioate linkage
  modified_base 21^22: mod_base = OTHER; note = phosphorothioate linkage
  modified_base 22^23: mod_base = OTHER; note = phosphorothioate linkage
gcagctcatgcatctcatacttc

SEQ ID NO: 450 - RNA, 23 nt, synthetic construct
  source 1..23: mol_type = other RNA
  misc_feature 1..23: note = Antisense: ETXS808; corresponding to SEQ ID NO: 210
  modified_base 1: mod_base = cm
  modified_base 2: mod_base = OTHER; note = 2'Fluoro-adenosine
  modified_base 3: mod_base = gm
  modified_base 4: mod_base = cm
  modified_base 5: mod_base = um
  modified_base 6: mod_base = OTHER; note = 2' Fluoro-cytidine
  modified_base 7: mod_base = OTHER; note = 2'O-methyl-adenosine
  modified_base 8: mod_base = OTHER; note = 2' Fluoro-uridine
  modified_base 9: mod_base = OTHER; note = 2' Fluoro-guanosine
  modified_base 10: mod_base = cm
  modified_base 11: mod_base = OTHER; note = 2'O-methyl-adenosine
  modified_base 12: mod_base = um
  modified_base 13: mod_base = cm
  modified_base 14: mod_base = OTHER; note = 2' Fluoro-uridine
  modified_base 15: mod_base = cm
  modified_base 16: mod_base = OTHER; note = 2'Fluoro-adenosine
  modified_base 17: mod_base = um
  modified_base 18: mod_base = OTHER; note = 2'O-methyl-adenosine
  modified_base 19: mod_base = cm
  modified_base 20: mod_base = um
  modified_base 21: mod_base = um
  modified_base 22: mod_base = cm
  modified_base 23: mod_base = um
  modified_base 1^2: mod_base = OTHER; note = phosphorothioate linkage
  modified_base 2^3: mod_base = OTHER; note = phosphorothioate linkage
  modified_base 21^22: mod_base = OTHER; note = phosphorothioate linkage
  modified_base 22^23: mod_base = OTHER; note = phosphorothioate linkage
cagctcatgcatctcatacttct

SEQ ID NO: 451 - RNA, 23 nt, synthetic construct
  source 1..23: mol_type = other RNA
  misc_feature 1..23: note = Antisense: ETXS810; corresponding to SEQ ID NO: 211
  modified_base 1: mod_base = um
  modified_base 2: mod_base = OTHER; note = 2' Fluoro-guanosine
  modified_base 3: mod_base = gm
  modified_base 4: mod_base = um
  modified_base 5: mod_base = OTHER; note = 2'O-methyl-adenosine
  modified_base 6: mod_base = OTHER; note = 2' Fluoro-guanosine
  modified_base 7: mod_base = gm
  modified_base 8: mod_base = OTHER; note = 2' Fluoro-guanosine
  modified_base 9: mod_base = OTHER; note = 2' Fluoro-cytidine
  modified_base 10: mod_base = OTHER; note = 2'O-methyl-adenosine
  modified_base 11: mod_base = gm
  modified_base 12: mod_base = um
  modified_base 13: mod_base = um
  modified_base 14: mod_base = OTHER; note = 2' Fluoro-uridine
  modified_base 15: mod_base = gm
  modified_base 16: mod_base = OTHER; note = 2'Fluoro-adenosine
  modified_base 17: mod_base = gm
  modified_base 18: mod_base = gm
  modified_base 19: mod_base = OTHER; note = 2'O-methyl-adenosine
  modified_base 20: mod_base = cm
  modified_base 21: mod_base = OTHER; note = 2'O-methyl-adenosine
  modified_base 22: mod_base = um
  modified_base 23: mod_base = gm
  modified_base 1^2: mod_base = OTHER; note = phosphorothioate linkage
  modified_base 2^3: mod_base = OTHER; note = phosphorothioate linkage
  modified_base 21^22: mod_base = OTHER; note = phosphorothioate linkage
  modified_base 22^23: mod_base = OTHER; note = phosphorothioate linkage
tggtagggcagtttgaggacatg

SEQ ID NO: 452 - RNA, 23 nt, synthetic construct
  source 1..23: mol_type = other RNA
  misc_feature 1..23: note = Antisense: ETXS812; corresponding to SEQ ID NO: 212
  modified_base 1: mod_base = gm
  modified_base 2: mod_base = OTHER; note = 2' Fluoro-guanosine
  modified_base 3: mod_base = OTHER; note = 2'O-methyl-adenosine
  modified_base 4: mod_base = um
  modified_base 5: mod_base = um
  modified_base 6: mod_base = OTHER; note = 2'Fluoro-adenosine
  modified_base 7: mod_base = OTHER; note = 2'O-methyl-adenosine
  modified_base 8: mod_base = OTHER; note = 2' Fluoro-uridine
  modified_base 9: mod_base = OTHER; note = 2' Fluoro-cytidine
  modified_base 10: mod_base = um
  modified_base 11: mod_base = cm
  modified_base 12: mod_base = OTHER; note = 2'O-methyl-adenosine
  modified_base 13: mod_base = um
  modified_base 14: mod_base = OTHER; note = 2' Fluoro-cytidine
  modified_base 15: mod_base = OTHER; note = 2'O-methyl-adenosine
  modified_base 16: mod_base = OTHER; note = 2'Fluoro-adenosine
  modified_base 17: mod_base = OTHER; note = 2'O-methyl-adenosine
  modified_base 18: mod_base = cm
  modified_base 19: mod_base = OTHER; note = 2'O-methyl-adenosine
  modified_base 20: mod_base = gm
  modified_base 21: mod_base = um
  modified_base 22: mod_base = um
  modified_base 23: mod_base = um
  modified_base 1^2: mod_base = OTHER; note = phosphorothioate linkage
  modified_base 2^3: mod_base = OTHER; note = phosphorothioate linkage
  modified_base 21^22: mod_base = OTHER; note = phosphorothioate linkage
  modified_base 22^23: mod_base = OTHER; note = phosphorothioate linkage
ggattaatctcatcaaacagttt

SEQ ID NO: 453 - RNA, 23 nt, synthetic construct
  source 1..23: mol_type = other RNA
  misc_feature 1..23: note = Antisense: ETXS814; corresponding to SEQ ID NO: 213
  modified_base 1: mod_base = OTHER; note = 2'O-methyl-adenosine
  modified_base 2: mod_base = OTHER; note = 2' Fluoro-uridine
  modified_base 3: mod_base = cm
  modified_base 4: mod_base = OTHER; note = 2'O-methyl-adenosine
  modified_base 5: mod_base = um
  modified_base 6: mod_base = OTHER; note = 2' Fluoro-guanosine
  modified_base 7: mod_base = gm
  modified_base 8: mod_base = OTHER; note = 2' Fluoro-guanosine
  modified_base 9: mod_base = OTHER; note = 2' Fluoro-cytidine
  modified_base 10: mod_base = OTHER; note = 2'O-methyl-adenosine
  modified_base 11: mod_base = cm
  modified_base 12: mod_base = cm
  modified_base 13: mod_base = um
  modified_base 14: mod_base = OTHER; note = 2' Fluoro-uridine
  modified_base 15: mod_base = OTHER; note = 2'O-methyl-adenosine
  modified_base 16: mod_base = OTHER; note = 2'Fluoro-adenosine
  modified_base 17: mod_base = um
  modified_base 18: mod_base = gm
  modified_base 19: mod_base = gm
  modified_base 20: mod_base = um
  modified_base 21: mod_base = cm
  modified_base 22: mod_base = um
  modified_base 23: mod_base = um
  modified_base 1^2: mod_base = OTHER; note = phosphorothioate linkage
  modified_base 2^3: mod_base = OTHER; note = phosphorothioate linkage
  modified_base 21^22: mod_base = OTHER; note = phosphorothioate linkage
  modified_base 22^23: mod_base = OTHER; note = phosphorothioate linkage
atcatgggcaccttaatggtctt

SEQ ID NO: 454 - RNA, 23 nt, synthetic construct
  source 1..23: mol_type = other RNA
  misc_feature 1..23: note = Antisense: ETXS816; corresponding to SEQ ID NO: 214
  modified_base 1: mod_base = cm
  modified_base 2: mod_base = OTHER; note = 2'Fluoro-adenosine
  modified_base 3: mod_base = um
  modified_base 4: mod_base = cm
  modified_base 5: mod_base = OTHER; note = 2'O-methyl-adenosine
  modified_base 6: mod_base = OTHER; note = 2' Fluoro-uridine
  modified_base 7: mod_base = gm
  modified_base 8: mod_base = OTHER; note = 2' Fluoro-guanosine
  modified_base 9: mod_base = OTHER; note = 2' Fluoro-guanosine
  modified_base 10: mod_base = cm
  modified_base 11: mod_base = OTHER; note = 2'O-methyl-adenosine
  modified_base 12: mod_base = cm
  modified_base 13: mod_base = cm
  modified_base 14: mod_base = OTHER; note = 2' Fluoro-uridine
  modified_base 15: mod_base = um
  modified_base 16: mod_base = OTHER; note = 2'Fluoro-adenosine
  modified_base 17: mod_base = OTHER; note = 2'O-methyl-adenosine
  modified_base 18: mod_base = um
  modified_base 19: mod_base = gm
  modified_base 20: mod_base = gm
  modified_base 21: mod_base = um
  modified_base 22: mod_base = cm
  modified_base 23: mod_base = um
  modified_base 1^2: mod_base = OTHER; note = phosphorothioate linkage
  modified_base 2^3: mod_base = OTHER; note = phosphorothioate linkage
  modified_base 21^22: mod_base = OTHER; note = phosphorothioate linkage
  modified_base 22^23: mod_base = OTHER; note = phosphorothioate linkage
catcatgggcaccttaatggtct

SEQ ID NO: 455 - RNA, 23 nt, synthetic construct
  source 1..23: mol_type = other RNA
  misc_feature 1..23: note = Antisense: ETXS818; corresponding to SEQ ID NO: 215
  modified_base 1: mod_base = um
  modified_base 2: mod_base = OTHER; note = 2' Fluoro-uridine
  modified_base 3: mod_base = cm
  modified_base 4: mod_base = OTHER; note = 2'O-methyl-adenosine
  modified_base 5: mod_base = cm
  modified_base 6: mod_base = OTHER; note = 2' Fluoro-cytidine
  modified_base 7: mod_base = OTHER; note = 2'O-methyl-adenosine
  modified_base 8: mod_base = OTHER; note = 2' Fluoro-cytidine
  modified_base 9: mod_base = OTHER; note = 2' Fluoro-cytidine
  modified_base 10: mod_base = cm
  modified_base 11: mod_base = um
  modified_base 12: mod_base = gm
  modified_base 13: mod_base = cm
  modified_base 14: mod_base = OTHER; note = 2' Fluoro-cytidine
  modified_base 15: mod_base = cm
  modified_base 16: mod_base = OTHER; note = 2'Fluoro-adenosine
  modified_base 17: mod_base = gm
  modified_base 18: mod_base = OTHER; note = 2'O-methyl-adenosine
  modified_base 19: mod_base = OTHER; note = 2'O-methyl-adenosine
  modified_base 20: mod_base = OTHER; note = 2'O-methyl-adenosine
  modified_base 21: mod_base = cm
  modified_base 22: mod_base = OTHER; note = 2'O-methyl-adenosine
  modified_base 23: mod_base = gm
  modified_base 1^2: mod_base = OTHER; note = phosphorothioate linkage
  modified_base 2^3: mod_base = OTHER; note = phosphorothioate linkage
  modified_base 21^22: mod_base = OTHER; note = phosphorothioate linkage
  modified_base 22^23: mod_base = OTHER; note = phosphorothioate linkage
ttcaccaccctgcccagaaacag

SEQ ID NO: 456 - RNA, 23 nt, synthetic construct
  source 1..23: mol_type = other RNA
  misc_feature 1..23: note = Antisense: ETXS820; corresponding to SEQ ID NO: 216
  modified_base 1: mod_base = cm
  modified_base 2: mod_base = OTHER; note = 2' Fluoro-cytidine
  modified_base 3: mod_base = OTHER; note = 2'O-methyl-adenosine
  modified_base 4: mod_base = cm
  modified_base 5: mod_base = cm
  modified_base 6: mod_base = OTHER; note = 2' Fluoro-cytidine
  modified_base 7: mod_base = um
  modified_base 8: mod_base = OTHER; note = 2' Fluoro-guanosine
  modified_base 9: mod_base = OTHER; note = 2' Fluoro-cytidine
  modified_base 10: mod_base = cm
  modified_base 11: mod_base = cm
  modified_base 12: mod_base = OTHER; note = 2'O-methyl-adenosine
  modified_base 13: mod_base = gm
  modified_base 14: mod_base = OTHER; note = 2'Fluoro-adenosine
  modified_base 15: mod_base = OTHER; note = 2'O-methyl-adenosine
  modified_base 16: mod_base = OTHER; note = 2'Fluoro-adenosine
  modified_base 17: mod_base = cm
  modified_base 18: mod_base = OTHER; note = 2'O-methyl-adenosine
  modified_base 19: mod_base = gm
  modified_base 20: mod_base = OTHER; note = 2'O-methyl-adenosine
  modified_base 21: mod_base = OTHER; note = 2'O-methyl-adenosine
  modified_base 22: mod_base = gm
  modified_base 23: mod_base = cm
  modified_base 1^2: mod_base = OTHER; note = phosphorothioate linkage
  modified_base 2^3: mod_base = OTHER; note = phosphorothioate linkage
  modified_base 21^22: mod_base = OTHER; note = phosphorothioate linkage
  modified_base 22^23: mod_base = OTHER; note = phosphorothioate linkage
ccaccctgcccagaaacagaagc

SEQ ID NO: 457 - RNA, 23 nt, synthetic construct
  source 1..23: mol_type = other RNA
  misc_feature 1..23: note = Antisense: ETXS822; corresponding to SEQ ID NO: 217
  modified_base 1: mod_base = gm
  modified_base 2: mod_base = OTHER; note = 2' Fluoro-cytidine
  modified_base 3: mod_base = um
  modified_base 4: mod_base = um
  modified_base 5: mod_base = gm
  modified_base 6: mod_base = OTHER; note = 2'Fluoro-adenosine
  modified_base 7: mod_base = OTHER; note = 2'O-methyl-adenosine
  modified_base 8: mod_base = OTHER; note = 2' Fluoro-cytidine
  modified_base 9: mod_base = OTHER; note = 2' Fluoro-uridine
  modified_base 10: mod_base = um
  modified_base 11: mod_base = cm
  modified_base 12: mod_base = gm
  modified_base 13: mod_base = gm
  modified_base 14: mod_base = OTHER; note = 2'Fluoro-adenosine
  modified_base 15: mod_base = OTHER; note = 2'O-methyl-adenosine
  modified_base 16: mod_base = OTHER; note = 2'Fluoro-adenosine
  modified_base 17: mod_base = gm
  modified_base 18: mod_base = OTHER; note = 2'O-methyl-adenosine
  modified_base 19: mod_base = OTHER; note = 2'O-methyl-adenosine
  modified_base 20: mod_base = OTHER; note = 2'O-methyl-adenosine
  modified_base 21: mod_base = OTHER; note = 2'O-methyl-adenosine
  modified_base 22: mod_base = cm
  modified_base 23: mod_base = um
  modified_base 1^2: mod_base = OTHER; note = phosphorothioate linkage
  modified_base 2^3: mod_base = OTHER; note = phosphorothioate linkage
  modified_base 21^22: mod_base = OTHER; note = phosphorothioate linkage
  modified_base 22^23: mod_base = OTHER; note = phosphorothioate linkage
gcttgaacttcggaaagaaaact

SEQ ID NO: 458 - RNA, 23 nt, synthetic construct
  source 1..23: mol_type = other RNA
  misc_feature 1..23: note = Antisense: ETXS824; corresponding to SEQ ID NO: 218
  modified_base 1: mod_base = OTHER; note = 2'O-methyl-adenosine
  modified_base 2: mod_base = OTHER; note = 2' Fluoro-guanosine
  modified_base 3: mod_base = cm
  modified_base 4: mod_base = um
  modified_base 5: mod_base = um
  modified_base 6: mod_base = OTHER; note = 2' Fluoro-guanosine
  modified_base 7: mod_base = OTHER; note = 2'O-methyl-adenosine
  modified_base 8: mod_base = OTHER; note = 2'Fluoro-adenosine
  modified_base 9: mod_base = OTHER; note = 2' Fluoro-cytidine
  modified_base 10: mod_base = um
  modified_base 11: mod_base = um
  modified_base 12: mod_base = cm
  modified_base 13: mod_base = gm
  modified_base 14: mod_base = OTHER; note = 2' Fluoro-guanosine
  modified_base 15: mod_base = OTHER; note = 2'O-methyl-adenosine
  modified_base 16: mod_base = OTHER; note = 2'Fluoro-adenosine
  modified_base 17: mod_base = OTHER; note = 2'O-methyl-adenosine
  modified_base 18: mod_base = gm
  modified_base 19: mod_base = OTHER; note = 2'O-methyl-adenosine
  modified_base 20: mod_base = OTHER; note = 2'O-methyl-adenosine
  modified_base 21: mod_base = OTHER; note = 2'O-methyl-adenosine
  modified_base 22: mod_base = OTHER; note = 2'O-methyl-adenosine
  modified_base 23: mod_base = cm
  modified_base 1^2: mod_base = OTHER; note = phosphorothioate linkage
  modified_base 2^3: mod_base = OTHER; note = phosphorothioate linkage
  modified_base 21^22: mod_base = OTHER; note = phosphorothioate linkage
  modified_base 22^23: mod_base = OTHER; note = phosphorothioate linkage
agcttgaacttcggaaagaaaac

SEQ ID NO: 459 - RNA, 23 nt, synthetic construct
  source 1..23: mol_type = other RNA
  misc_feature 1..23: note = Antisense: ETXS826; corresponding to SEQ ID NO: 219
  modified_base 1: mod_base = OTHER; note = 2'O-methyl-adenosine
  modified_base 2: mod_base = OTHER; note = 2' Fluoro-cytidine
  modified_base 3: mod_base = cm
  modified_base 4: mod_base = OTHER; note = 2'O-methyl-adenosine
  modified_base 5: mod_base = cm
  modified_base 6: mod_base = OTHER; note = 2' Fluoro-cytidine
  modified_base 7: mod_base = cm
  modified_base 8: mod_base = OTHER; note = 2' Fluoro-uridine
  modified_base 9: mod_base = OTHER; note = 2' Fluoro-guanosine
  modified_base 10: mod_base = cm
  modified_base 11: mod_base = cm
  modified_base 12: mod_base = cm
  modified_base 13: mod_base = OTHER; note = 2'O-methyl-adenosine
  modified_base 14: mod_base = OTHER; note = 2' Fluoro-guanosine
  modified_base 15: mod_base = OTHER; note = 2'O-methyl-adenosine
  modified_base 16: mod_base = OTHER; note = 2'Fluoro-adenosine
  modified_base 17: mod_base = OTHER; note = 2'O-methyl-adenosine
  modified_base 18: mod_base = cm
  modified_base 19: mod_base = OTHER; note = 2'O-methyl-adenosine
  modified_base 20: mod_base = gm
  modified_base 21: mod_base = OTHER; note = 2'O-methyl-adenosine
  modified_base 22: mod_base = OTHER; note = 2'O-methyl-adenosine
  modified_base 23: mod_base = gm
  modified_base 1^2: mod_base = OTHER; note = phosphorothioate linkage
  modified_base 2^3: mod_base = OTHER; note = phosphorothioate linkage
  modified_base 21^22: mod_base = OTHER; note = phosphorothioate linkage
  modified_base 22^23: mod_base = OTHER; note = phosphorothioate linkage
accaccctgcccagaaacagaag

SEQ ID NO: 460 - RNA, 23 nt, synthetic construct
  source 1..23: mol_type = other RNA
  misc_feature 1..23: note = Antisense: ETXS828; corresponding to SEQ ID NO: 220
  modified_base 1: mod_base = gm
  modified_base 2: mod_base = OTHER; note = 2' Fluoro-guanosine
  modified_base 3: mod_base = um
  modified_base 4: mod_base = OTHER; note = 2'O-methyl-adenosine
  modified_base 5: mod_base = gm
  modified_base 6: mod_base = OTHER; note = 2' Fluoro-guanosine
  modified_base 7: mod_base = gm
  modified_base 8: mod_base = OTHER; note = 2' Fluoro-cytidine
  modified_base 9: mod_base = OTHER; note = 2'Fluoro-adenosine
  modified_base 10: mod_base = gm
  modified_base 11: mod_base = um
  modified_base 12: mod_base = um
  modified_base 13: mod_base = um
  modified_base 14: mod_base = OTHER; note = 2' Fluoro-guanosine
  modified_base 15: mod_base = OTHER; note = 2'O-methyl-adenosine
  modified_base 16: mod_base = OTHER; note = 2' Fluoro-guanosine
  modified_base 17: mod_base = gm
  modified_base 18: mod_base = OTHER; note = 2'O-methyl-adenosine
  modified_base 19: mod_base = cm
  modified_base 20: mod_base = OTHER; note = 2'O-methyl-adenosine
  modified_base 21: mod_base = um
  modified_base 22: mod_base = gm
  modified_base 23: mod_base = OTHER; note = 2'O-methyl-adenosine
  modified_base 1^2: mod_base = OTHER; note = phosphorothioate linkage
  modified_base 2^3: mod_base = OTHER; note = phosphorothioate linkage
  modified_base 21^22: mod_base = OTHER; note = phosphorothioate linkage
  modified_base 22^23: mod_base = OTHER; note = phosphorothioate linkage
ggtagggcagtttgaggacatga

SEQ ID NO: 461 - RNA, 23 nt, synthetic construct
  source 1..23: mol_type = other RNA
  misc_feature 1..23: note = Antisense: ETXS830; corresponding to SEQ ID NO: 221
  modified_base 1: mod_base = um
  modified_base 2: mod_base = OTHER; note = 2' Fluoro-guanosine
  modified_base 3: mod_base = um
  modified_base 4: mod_base = cm
  modified_base 5: mod_base = cm
  modified_base 6: mod_base = OTHER; note = 2'Fluoro-adenosine
  modified_base 7: mod_base = gm
  modified_base 8: mod_base = OTHER; note = 2' Fluoro-guanosine
  modified_base 9: mod_base = OTHER; note = 2' Fluoro-uridine
  modified_base 10: mod_base = gm
  modified_base 11: mod_base = gm
  modified_base 12: mod_base = OTHER; note = 2'O-methyl-adenosine
  modified_base 13: mod_base = OTHER; note = 2'O-methyl-adenosine
  modified_base 14: mod_base = OTHER; note = 2'Fluoro-adenosine
  modified_base 15: mod_base = gm
  modified_base 16: mod_base = OTHER; note = 2' Fluoro-uridine
  modified_base 17: mod_base = gm
  modified_base 18: mod_base = um
  modified_base 19: mod_base = cm
  modified_base 20: mod_base = gm
  modified_base 21: mod_base = OTHER; note = 2'O-methyl-adenosine
  modified_base 22: mod_base = cm
  modified_base 23: mod_base = um
  modified_base 1^2: mod_base = OTHER; note = phosphorothioate linkage
  modified_base 2^3: mod_base = OTHER; note = phosphorothioate linkage
  modified_base 21^22: mod_base = OTHER; note = phosphorothioate linkage
  modified_base 22^23: mod_base = OTHER; note = phosphorothioate linkage
tgtccaggtggaaagtgtcgact

SEQ ID NO: 462 - RNA, 19 nt, synthetic construct
  source 1..19: mol_type = other RNA
  misc_feature 1..19: note = Antisense: ETXS832; corresponding to SEQ ID NO: 222
  modified_base 1: mod_base = OTHER; note = 2'O-methyl-adenosine
  modified_base 2: mod_base = OTHER; note = 2'Fluoro-adenosine
  modified_base 3: mod_base = OTHER; note = 2'O-methyl-adenosine
  modified_base 4: mod_base = OTHER; note = 2' Fluoro-uridine
  modified_base 5: mod_base = cm
  modified_base 6: mod_base = OTHER; note = 2' Fluoro-cytidine
  modified_base 7: mod_base = um
  modified_base 8: mod_base = OTHER; note = 2' Fluoro-uridine
  modified_base 9: mod_base = gm
  modified_base 10: mod_base = OTHER; note = 2' Fluoro-uridine
  modified_base 11: mod_base = gm
  modified_base 12: mod_base = OTHER; note = 2' Fluoro-guanosine
  modified_base 13: mod_base = OTHER; note = 2'O-methyl-adenosine
  modified_base 14: mod_base = OTHER; note = 2' Fluoro-uridine
  modified_base 15: mod_base = gm
  modified_base 16: mod_base = OTHER; note = 2'Fluoro-adenosine
  modified_base 17: mod_base = OTHER; note = 2'O-methyl-adenosine
  modified_base 18: mod_base = OTHER; note = 2' Fluoro-guanosine
  modified_base 19: mod_base = gm
  modified_base 1^2: mod_base = OTHER; note = phosphorothioate linkage
  modified_base 2^3: mod_base = OTHER; note = phosphorothioate linkage
  modified_base 17^18: mod_base = OTHER; note = phosphorothioate linkage
  modified_base 18^19: mod_base = OTHER; note = phosphorothioate linkage
aaatccttgtggatgaagg

SEQ ID NO: 463 - RNA, 19 nt, synthetic construct
  source 1..19: mol_type = other RNA
  misc_feature 1..19: note = Antisense: ETXS834; corresponding to SEQ ID NO: 223
  modified_base 1: mod_base = gm
  modified_base 2: mod_base = OTHER; note = 2' Fluoro-cytidine
  modified_base 3: mod_base = cm
  modified_base 4: mod_base = OTHER; note = 2' Fluoro-uridine
  modified_base 5: mod_base = cm
  modified_base 6: mod_base = OTHER; note = 2'Fluoro-adenosine
  modified_base 7: mod_base = um
  modified_base 8: mod_base = OTHER; note = 2' Fluoro-guanosine
  modified_base 9: mod_base = gm
  modified_base 10: mod_base = OTHER; note = 2'Fluoro-adenosine
  modified_base 11: mod_base = gm
  modified_base 12: mod_base = OTHER; note = 2'Fluoro-adenosine
  modified_base 13: mod_base = um
  modified_base 14: mod_base = OTHER; note = 2' Fluoro-cytidine
  modified_base 15: mod_base = um
  modified_base 16: mod_base = OTHER; note = 2' Fluoro-uridine
  modified_base 17: mod_base = um
  modified_base 18: mod_base = OTHER; note = 2' Fluoro-cytidine
  modified_base 19: mod_base = gm
  modified_base 1^2: mod_base = OTHER; note = phosphorothioate linkage
  modified_base 2^3: mod_base = OTHER; note = phosphorothioate linkage
  modified_base 17^18: mod_base = OTHER; note = phosphorothioate linkage
  modified_base 18^19: mod_base = OTHER; note = phosphorothioate linkage
gcctcatggagatctttcg

SEQ ID NO: 464 - RNA, 19 nt, synthetic construct
  source 1..19: mol_type = other RNA
  misc_feature 1..19: note = Antisense: ETXS836; corresponding to SEQ ID NO: 224
  modified_base 1: mod_base = um
  modified_base 2: mod_base = OTHER; note = 2' Fluoro-uridine
  modified_base 3: mod_base = cm
  modified_base 4: mod_base = OTHER; note = 2' Fluoro-uridine
  modified_base 5: mod_base = cm
  modified_base 6: mod_base = OTHER; note = 2' Fluoro-cytidine
  modified_base 7: mod_base = OTHER; note = 2'O-methyl-adenosine
  modified_base 8: mod_base = OTHER; note = 2' Fluoro-uridine
  modified_base 9: mod_base = gm
  modified_base 10: mod_base = OTHER; note = 2'Fluoro-adenosine
  modified_base 11: mod_base = gm
  modified_base 12: mod_base = OTHER; note = 2' Fluoro-guanosine
  modified_base 13: mod_base = OTHER; note = 2'O-methyl-adenosine
  modified_base 14: mod_base = OTHER; note = 2' Fluoro-cytidine
  modified_base 15: mod_base = cm
  modified_base 16: mod_base = OTHER; note = 2'Fluoro-adenosine
  modified_base 17: mod_base = cm
  modified_base 18: mod_base = OTHER; note = 2' Fluoro-cytidine
  modified_base 19: mod_base = OTHER; note = 2'O-methyl-adenosine
  modified_base 1^2: mod_base = OTHER; note = phosphorothioate linkage
  modified_base 2^3: mod_base = OTHER; note = phosphorothioate linkage
  modified_base 17^18: mod_base = OTHER; note = phosphorothioate linkage
  modified_base 18^19: mod_base = OTHER; note = phosphorothioate linkage
ttctccatgaggaccacca

SEQ ID NO: 465 - RNA, 19 nt, synthetic construct
  source 1..19: mol_type = other RNA
  misc_feature 1..19: note = Antisense: ETXS838; corresponding to SEQ ID NO: 225
  modified_base 1: mod_base = um
  modified_base 2: mod_base = OTHER; note = 2' Fluoro-guanosine
  modified_base 3: mod_base = cm
  modified_base 4: mod_base = OTHER; note = 2' Fluoro-cytidine
  modified_base 5: mod_base = um
  modified_base 6: mod_base = OTHER; note = 2' Fluoro-cytidine
  modified_base 7: mod_base = OTHER; note = 2'O-methyl-adenosine
  modified_base 8: mod_base = OTHER; note = 2' Fluoro-uridine
  modified_base 9: mod_base = gm
  modified_base 10: mod_base = OTHER; note = 2' Fluoro-guanosine
  modified_base 11: mod_base = OTHER; note = 2'O-methyl-adenosine
  modified_base 12: mod_base = OTHER; note = 2' Fluoro-guanosine
  modified_base 13: mod_base = OTHER; note = 2'O-methyl-adenosine
  modified_base 14: mod_base = OTHER; note = 2' Fluoro-uridine
  modified_base 15: mod_base = cm
  modified_base 16: mod_base = OTHER; note = 2' Fluoro-uridine
  modified_base 17: mod_base = um
  modified_base 18: mod_base = OTHER; note = 2' Fluoro-uridine
  modified_base 19: mod_base = cm
  modified_base 1^2: mod_base = OTHER; note = phosphorothioate linkage
  modified_base 2^3: mod_base = OTHER; note = phosphorothioate linkage
  modified_base 17^18: mod_base = OTHER; note = phosphorothioate linkage
  modified_base 18^19: mod_base = OTHER; note = phosphorothioate linkage
tgcctcatggagatctttc

SEQ ID NO: 466 - RNA, 19 nt, synthetic construct
  source 1..19: mol_type = other RNA
  misc_feature 1..19: note = Antisense: ETXS840; corresponding to SEQ ID NO: 226
  modified_base 1: mod_base = OTHER; note = 2'O-methyl-adenosine
  modified_base 2: mod_base = OTHER; note = 2' Fluoro-guanosine
  modified_base 3: mod_base = cm
  modified_base 4: mod_base = OTHER; note = 2'Fluoro-adenosine
  modified_base 5: mod_base = gm
  modified_base 6: mod_base = OTHER; note = 2' Fluoro-cytidine
  modified_base 7: mod_base = um
  modified_base 8: mod_base = OTHER; note = 2' Fluoro-cytidine
  modified_base 9: mod_base = OTHER; note = 2'O-methyl-adenosine
  modified_base 10: mod_base = OTHER; note = 2' Fluoro-uridine
  modified_base 11: mod_base = gm
  modified_base 12: mod_base = OTHER; note = 2' Fluoro-cytidine
  modified_base 13: mod_base = OTHER; note = 2'O-methyl-adenosine
  modified_base 14: mod_base = OTHER; note = 2' Fluoro-uridine
  modified_base 15: mod_base = cm
  modified_base 16: mod_base = OTHER; note = 2' Fluoro-uridine
  modified_base 17: mod_base = cm
  modified_base 18: mod_base = OTHER; note = 2'Fluoro-adenosine
  modified_base 19: mod_base = um
  modified_base 1^2: mod_base = OTHER; note = phosphorothioate linkage
  modified_base 2^3: mod_base = OTHER; note = phosphorothioate linkage
  modified_base 17^18: mod_base = OTHER; note = phosphorothioate linkage
  modified_base 18^19: mod_base = OTHER; note = phosphorothioate linkage
agcagctcatgcatctcat

SEQ ID NO: 467 - RNA, 19 nt, synthetic construct
  source 1..19: mol_type = other RNA
  misc_feature 1..19: note = Antisense: ETXS842; corresponding to SEQ ID NO: 227
  modified_base 1: mod_base = um
  modified_base 2: mod_base = OTHER; note = 2' Fluoro-cytidine
  modified_base 3: mod_base = OTHER; note = 2'O-methyl-adenosine
  modified_base 4: mod_base = OTHER; note = 2' Fluoro-guanosine
  modified_base 5: mod_base = gm
  modified_base 6: mod_base = OTHER; note = 2'Fluoro-adenosine
  modified_base 7: mod_base = um
  modified_base 8: mod_base = OTHER; note = 2' Fluoro-uridine
  modified_base 9: mod_base = OTHER; note = 2'O-methyl-adenosine
  modified_base 10: mod_base = OTHER; note = 2'Fluoro-adenosine
  modified_base 11: mod_base = um
  modified_base 12: mod_base = OTHER; note = 2' Fluoro-cytidine
  modified_base 13: mod_base = um
  modified_base 14: mod_base = OTHER; note = 2' Fluoro-cytidine
  modified_base 15: mod_base = OTHER; note = 2'O-methyl-adenosine
  modified_base 16: mod_base = OTHER; note = 2' Fluoro-uridine
  modified_base 17: mod_base = cm
  modified_base 18: mod_base = OTHER; note = 2'Fluoro-adenosine
  modified_base 19: mod_base = OTHER; note = 2'O-methyl-adenosine
  modified_base 1^2: mod_base = OTHER; note = phosphorothioate linkage
  modified_base 2^3: mod_base = OTHER; note = phosphorothioate linkage
  modified_base 17^18: mod_base = OTHER; note = phosphorothioate linkage
  modified_base 18^19: mod_base = OTHER; note = phosphorothioate linkage
tcaggattaatctcatcaa

SEQ ID NO: 468 - RNA, 19 nt, synthetic construct
  source 1..19: mol_type = other RNA
  misc_feature 1..19: note = Antisense: ETXS844; corresponding to SEQ ID NO: 228
  modified_base 1: mod_base = um
  modified_base 2: mod_base = OTHER; note = 2' Fluoro-uridine
  modified_base 3: mod_base = gm
  modified_base 4: mod_base = OTHER; note = 2' Fluoro-guanosine
  modified_base 5: mod_base = um
  modified_base 6: mod_base = OTHER; note = 2' Fluoro-uridine
  modified_base 7: mod_base = um
  modified_base 8: mod_base = OTHER; note = 2' Fluoro-cytidine
  modified_base 9: mod_base = OTHER; note = 2'O-methyl-adenosine
  modified_base 10: mod_base = OTHER; note = 2' Fluoro-guanosine
  modified_base 11: mod_base = gm
  modified_base 12: mod_base = OTHER; note = 2'Fluoro-adenosine
  modified_base 13: mod_base = um
  modified_base 14: mod_base = OTHER; note = 2' Fluoro-uridine
  modified_base 15: mod_base = OTHER; note = 2'O-methyl-adenosine
  modified_base 16: mod_base = OTHER; note = 2'Fluoro-adenosine
  modified_base 17: mod_base = um
  modified_base 18: mod_base = OTHER; note = 2' Fluoro-cytidine
  modified_base 19: mod_base = um
  modified_base 1^2: mod_base = OTHER; note = phosphorothioate linkage
  modified_base 2^3: mod_base = OTHER; note = phosphorothioate linkage
  modified_base 17^18: mod_base = OTHER; note = phosphorothioate linkage
  modified_base 18^19: mod_base = OTHER; note = phosphorothioate linkage
ttggtttcaggattaatct

SEQ ID NO: 469 - RNA, 19 nt, synthetic construct
  source 1..19: mol_type = other RNA
  misc_feature 1..19: note = Antisense: ETXS846; corresponding to SEQ ID NO: 229
  modified_base 1: mod_base = gm
  modified_base 2: mod_base = OTHER; note = 2' Fluoro-uridine
  modified_base 3: mod_base = um
  modified_base 4: mod_base = OTHER; note = 2' Fluoro-uridine
  modified_base 5: mod_base = cm
  modified_base 6: mod_base = OTHER; note = 2'Fluoro-adenosine
  modified_base 7: mod_base = gm
  modified_base 8: mod_base = OTHER; note = 2' Fluoro-guanosine
  modified_base 9: mod_base = OTHER; note = 2'O-methyl-adenosine
  modified_base 10: mod_base = OTHER; note = 2' Fluoro-uridine
  modified_base 11: mod_base = um
  modified_base 12: mod_base = OTHER; note = 2'Fluoro-adenosine
  modified_base 13: mod_base = OTHER; note = 2'O-methyl-adenosine
  modified_base 14: mod_base = OTHER; note = 2' Fluoro-uridine
  modified_base 15: mod_base = cm
  modified_base 16: mod_base = OTHER; note = 2' Fluoro-uridine
  modified_base 17: mod_base = cm
  modified_base 18: mod_base = OTHER; note = 2'Fluoro-adenosine
  modified_base 19: mod_base = um
  modified_base 1^2: mod_base = OTHER; note = phosphorothioate linkage
  modified_base 2^3: mod_base = OTHER; note = phosphorothioate linkage
  modified_base 17^18: mod_base = OTHER; note = phosphorothioate linkage
  modified_base 18^19: mod_base = OTHER; note = phosphorothioate linkage
gtttcaggattaatctcat

SEQ ID NO: 470 - RNA, 19 nt, synthetic construct
  source 1..19: mol_type = other RNA
  misc_feature 1..19: note = Antisense: ETXS848; corresponding to SEQ ID NO: 230
  modified_base 1: mod_base = um
  modified_base 2: mod_base = OTHER; note = 2' Fluoro-guanosine
  modified_base 3: mod_base = gm
  modified_base 4: mod_base = OTHER; note = 2' Fluoro-uridine
  modified_base 5: mod_base = um
  modified_base 6: mod_base = OTHER; note = 2' Fluoro-uridine
  modified_base 7: mod_base = cm
  modified_base 8: mod_base = OTHER; note = 2'Fluoro-adenosine
  modified_base 9: mod_base = gm
  modified_base 10: mod_base = OTHER; note = 2' Fluoro-guanosine
  modified_base 11: mod_base = OTHER; note = 2'O-methyl-adenosine
  modified_base 12: mod_base = OTHER; note = 2' Fluoro-uridine
  modified_base 13: mod_base = um
  modified_base 14: mod_base = OTHER; note = 2'Fluoro-adenosine
  modified_base 15: mod_base = OTHER; note = 2'O-methyl-adenosine
  modified_base 16: mod_base = OTHER; note = 2' Fluoro-uridine
  modified_base 17: mod_base = cm
  modified_base 18: mod_base = OTHER; note = 2' Fluoro-uridine
  modified_base 19: mod_base = cm
  modified_base 1^2: mod_base = OTHER; note = phosphorothioate linkage
  modified_base 2^3: mod_base = OTHER; note = phosphorothioate linkage
  modified_base 17^18: mod_base = OTHER; note = phosphorothioate linkage
  modified_base 18^19: mod_base = OTHER; note = phosphorothioate linkage
tggtttcaggattaatctc

SEQ ID NO: 471 - RNA, 19 nt, synthetic construct
  source 1..19: mol_type = other RNA
  misc_feature 1..19: note = Antisense: ETXS850; corresponding to SEQ ID NO: 231
  modified_base 1: mod_base = gm
  modified_base 2: mod_base = OTHER; note = 2' Fluoro-guanosine
  modified_base 3: mod_base = um
  modified_base 4: mod_base = OTHER; note = 2' Fluoro-uridine
  modified_base 5: mod_base = um
  modified_base 6: mod_base = OTHER; note = 2' Fluoro-cytidine
  modified_base 7: mod_base = OTHER; note = 2'O-methyl-adenosine
  modified_base 8: mod_base = OTHER; note = 2' Fluoro-guanosine
  modified_base 9: mod_base = gm
  modified_base 10: mod_base = OTHER; note = 2'Fluoro-adenosine
  modified_base 11: mod_base = um
  modified_base 12: mod_base = OTHER; note = 2' Fluoro-uridine
  modified_base 13: mod_base = OTHER; note = 2'O-methyl-adenosine
  modified_base 14: mod_base = OTHER; note = 2'Fluoro-adenosine
  modified_base 15: mod_base = um
  modified_base 16: mod_base = OTHER; note = 2' Fluoro-cytidine
  modified_base 17: mod_base = um
  modified_base 18: mod_base = OTHER; note = 2' Fluoro-cytidine
  modified_base 19: mod_base = OTHER; note = 2'O-methyl-adenosine
  modified_base 1^2: mod_base = OTHER; note = phosphorothioate linkage
  modified_base 2^3: mod_base = OTHER; note = phosphorothioate linkage
  modified_base 17^18: mod_base = OTHER; note = phosphorothioate linkage
  modified_base 18^19: mod_base = OTHER; note = phosphorothioate linkage
ggtttcaggattaatctca

SEQ ID NO: 472 - RNA, 19 nt, synthetic construct
  source 1..19: mol_type = other RNA
  misc_feature 1..19: note = Antisense: ETXS852; corresponding to SEQ ID NO: 232
  modified_base 1: mod_base = OTHER; note = 2'O-methyl-adenosine
  modified_base 2: mod_base = OTHER; note = 2' Fluoro-guanosine
  modified_base 3: mod_base = gm
  modified_base 4: mod_base = OTHER; note = 2'Fluoro-adenosine
  modified_base 5: mod_base = um
  modified_base 6: mod_base = OTHER; note = 2' Fluoro-uridine
  modified_base 7: mod_base = OTHER; note = 2'O-methyl-adenosine
  modified_base 8: mod_base = OTHER; note = 2'Fluoro-adenosine
  modified_base 9: mod_base = um
  modified_base 10: mod_base = OTHER; note = 2' Fluoro-cytidine
  modified_base 11: mod_base = um
  modified_base 12: mod_base = OTHER; note = 2' Fluoro-cytidine
  modified_base 13: mod_base = OTHER; note = 2'O-methyl-adenosine
  modified_base 14: mod_base = OTHER; note = 2' Fluoro-uridine
  modified_base 15: mod_base = cm
  modified_base 16: mod_base = OTHER; note = 2'Fluoro-adenosine
  modified_base 17: mod_base = OTHER; note = 2'O-methyl-adenosine
  modified_base 18: mod_base = OTHER; note = 2'Fluoro-adenosine
  modified_base 19: mod_base = cm
  modified_base 1^2: mod_base = OTHER; note = phosphorothioate linkage
  modified_base 2^3: mod_base = OTHER; note = phosphorothioate linkage
  modified_base 17^18: mod_base = OTHER; note = phosphorothioate linkage
  modified_base 18^19: mod_base = OTHER; note = phosphorothioate linkage
aggattaatctcatcaaac

SEQ ID NO: 473 - RNA, 19 nt, synthetic construct
  source 1..19: mol_type = other RNA
  misc_feature 1..19: note = Antisense: ETXS854; corresponding to SEQ ID NO: 233
  modified_base 1: mod_base = um
  modified_base 2: mod_base = OTHER; note = 2' Fluoro-cytidine
  modified_base 3: mod_base = cm
  modified_base 4: mod_base = OTHER; note = 2' Fluoro-uridine
  modified_base 5: mod_base = um
  modified_base 6: mod_base = OTHER; note = 2' Fluoro-guanosine
  modified_base 7: mod_base = um
  modified_base 8: mod_base = OTHER; note = 2' Fluoro-guanosine
  modified_base 9: mod_base = gm
  modified_base 10: mod_base = OTHER; note = 2'Fluoro-adenosine
  modified_base 11: mod_base = um
  modified_base 12: mod_base = OTHER; note = 2' Fluoro-guanosine
  modified_base 13: mod_base = OTHER; note = 2'O-methyl-adenosine
  modified_base 14: mod_base = OTHER; note = 2'Fluoro-adenosine
  modified_base 15: mod_base = gm
  modified_base 16: mod_base = OTHER; note = 2' Fluoro-guanosine
  modified_base 17: mod_base = cm
  modified_base 18: mod_base = OTHER; note = 2'Fluoro-adenosine
  modified_base 19: mod_base = OTHER; note = 2'O-methyl-adenosine
  modified_base 1^2: mod_base = OTHER; note = phosphorothioate linkage
  modified_base 2^3: mod_base = OTHER; note = phosphorothioate linkage
  modified_base 17^18: mod_base = OTHER; note = phosphorothioate linkage
  modified_base 18^19: mod_base = OTHER; note = phosphorothioate linkage
tccttgtggatgaaggcaa

SEQ ID NO: 474 - RNA, 19 nt, synthetic construct
  source 1..19: mol_type = other RNA
  misc_feature 1..19: note = Antisense: ETXS856; corresponding to SEQ ID NO: 234
  modified_base 1: mod_base = gm
  modified_base 2: mod_base = OTHER; note = 2' Fluoro-uridine
  modified_base 3: mod_base = gm
  modified_base 4: mod_base = OTHER; note = 2' Fluoro-cytidine
  modified_base 5: mod_base = cm
  modified_base 6: mod_base = OTHER; note = 2' Fluoro-uridine
  modified_base 7: mod_base = cm
  modified_base 8: mod_base = OTHER; note = 2'Fluoro-adenosine
  modified_base 9: mod_base = um
  modified_base 10: mod_base = OTHER; note = 2' Fluoro-guanosine
  modified_base 11: mod_base = gm
  modified_base 12: mod_base = OTHER; note = 2'Fluoro-adenosine
  modified_base 13: mod_base = gm
  modified_base 14: mod_base = OTHER; note = 2'Fluoro-adenosine
  modified_base 15: mod_base = um
  modified_base 16: mod_base = OTHER; note = 2' Fluoro-cytidine
  modified_base 17: mod_base = um
  modified_base 18: mod_base = OTHER; note = 2' Fluoro-uridine
  modified_base 19: mod_base = um
  modified_base 1^2: mod_base = OTHER; note = phosphorothioate linkage
  modified_base 2^3: mod_base = OTHER; note = phosphorothioate linkage
  modified_base 17^18: mod_base = OTHER; note = phosphorothioate linkage
  modified_base 18^19: mod_base = OTHER; note = phosphorothioate linkage
gtgcctcatggagatcttt

SEQ ID NO: 475 - RNA, 19 nt, synthetic construct
  source 1..19: mol_type = other RNA
  misc_feature 1..19: note = Antisense: ETXS858; corresponding to SEQ ID NO: 235
  modified_base 1: mod_base = um
  modified_base 2: mod_base = OTHER; note = 2' Fluoro-cytidine
  modified_base 3: mod_base = um
  modified_base 4: mod_base = OTHER; note = 2' Fluoro-cytidine
  modified_base 5: mod_base = cm
  modified_base 6: mod_base = OTHER; note = 2'Fluoro-adenosine
  modified_base 7: mod_base = um
  modified_base 8: mod_base = OTHER; note = 2' Fluoro-guanosine
  modified_base 9: mod_base = OTHER; note = 2'O-methyl-adenosine
  modified_base 10: mod_base = OTHER; note = 2' Fluoro-guanosine
  modified_base 11: mod_base = gm
  modified_base 12: mod_base = OTHER; note = 2'Fluoro-adenosine
  modified_base 13: mod_base = cm
  modified_base 14: mod_base = OTHER; note = 2' Fluoro-cytidine
  modified_base 15: mod_base = OTHER; note = 2'O-methyl-adenosine
  modified_base 16: mod_base = OTHER; note = 2' Fluoro-cytidine
  modified_base 17: mod_base = cm
  modified_base 18: mod_base = OTHER; note = 2'Fluoro-adenosine
  modified_base 19: mod_base = gm
  modified_base 1^2: mod_base = OTHER; note = phosphorothioate linkage
  modified_base 2^3: mod_base = OTHER; note = phosphorothioate linkage
  modified_base 17^18: mod_base = OTHER; note = phosphorothioate linkage
  modified_base 18^19: mod_base = OTHER; note = phosphorothioate linkage
tctccatgaggaccaccag

SEQ ID NO: 476 - RNA, 19 nt, synthetic construct
  source 1..19: mol_type = other RNA
  misc_feature 1..19: note = Antisense: ETXS860; corresponding to SEQ ID NO: 236
  modified_base 1: mod_base = cm
  modified_base 2: mod_base = OTHER; note = 2'Fluoro-adenosine
  modified_base 3: mod_base = OTHER; note = 2'O-methyl-adenosine
  modified_base 4: mod_base = OTHER; note = 2'Fluoro-adenosine
  modified_base 5: mod_base = OTHER; note = 2'O-methyl-adenosine
  modified_base 6: mod_base = OTHER; note = 2' Fluoro-uridine
  modified_base 7: mod_base = cm
  modified_base 8: mod_base = OTHER; note = 2' Fluoro-cytidine
  modified_base 9: mod_base = um
  modified_base 10: mod_base = OTHER; note = 2' Fluoro-uridine
  modified_base 11: mod_base = gm
  modified_base 12: mod_base = OTHER; note = 2' Fluoro-uridine
  modified_base 13: mod_base = gm
  modified_base 14: mod_base = OTHER; note = 2' Fluoro-guanosine
  modified_base 15: mod_base = OTHER; note = 2'O-methyl-adenosine
  modified_base 16: mod_base = OTHER; note = 2' Fluoro-uridine
  modified_base 17: mod_base = gm
  modified_base 18: mod_base = OTHER; note = 2'Fluoro-adenosine
  modified_base 19: mod_base = OTHER; note = 2'O-methyl-adenosine
  modified_base 1^2: mod_base = OTHER; note = phosphorothioate linkage
  modified_base 2^3: mod_base = OTHER; note = phosphorothioate linkage
  modified_base 17^18: mod_base = OTHER; note = phosphorothioate linkage
  modified_base 18^19: mod_base = OTHER; note = phosphorothioate linkage
caaaatccttgtggatgaa

SEQ ID NO: 477 - RNA, 19 nt, synthetic construct
  source 1..19: mol_type = other RNA
  misc_feature 1..19: note = Antisense: ETXS862; corresponding to SEQ ID NO: 237
  modified_base 1: mod_base = cm
  modified_base 2: mod_base = OTHER; note = 2' Fluoro-guanosine
  modified_base 3: mod_base = um
  modified_base 4: mod_base = OTHER; note = 2' Fluoro-guanosine
  modified_base 5: mod_base = cm
  modified_base 6: mod_base = OTHER; note = 2' Fluoro-cytidine
  modified_base 7: mod_base = um
  modified_base 8: mod_base = OTHER; note = 2' Fluoro-cytidine
  modified_base 9: mod_base = OTHER; note = 2'O-methyl-adenosine
  modified_base 10: mod_base = OTHER; note = 2' Fluoro-uridine
  modified_base 11: mod_base = gm
  modified_base 12: mod_base = OTHER; note = 2' Fluoro-guanosine
  modified_base 13: mod_base = OTHER; note = 2'O-methyl-adenosine
  modified_base 14: mod_base = OTHER; note = 2' Fluoro-guanosine
  modified_base 15: mod_base = OTHER; note = 2'O-methyl-adenosine
  modified_base 16: mod_base = OTHER; note = 2' Fluoro-uridine
  modified_base 17: mod_base = cm
  modified_base 18: mod_base = OTHER; note = 2' Fluoro-uridine
  modified_base 19: mod_base = um
  modified_base 1^2: mod_base = OTHER; note = phosphorothioate linkage
  modified_base 2^3: mod_base = OTHER; note = phosphorothioate linkage
  modified_base 17^18: mod_base = OTHER; note = phosphorothioate linkage
  modified_base 18^19: mod_base = OTHER; note = phosphorothioate linkage
cgtgcctcatggagatctt

SEQ ID NO: 478 - RNA, 19 nt, synthetic construct
  source 1..19: mol_type = other RNA
  misc_feature 1..19: note = Antisense: ETXS864; corresponding to SEQ ID NO: 238
  modified_base 1: mod_base = OTHER; note = 2'O-methyl-adenosine
  modified_base 2: mod_base = OTHER; note = 2' Fluoro-uridine
  modified_base 3: mod_base = cm
  modified_base 4: mod_base = OTHER; note = 2'Fluoro-adenosine
  modified_base 5: mod_base = OTHER; note = 2'O-methyl-adenosine
  modified_base 6: mod_base = OTHER; note = 2'Fluoro-adenosine
  modified_base 7: mod_base = OTHER; note = 2'O-methyl-adenosine
  modified_base 8: mod_base = OTHER; note = 2' Fluoro-uridine
  modified_base 9: mod_base = cm
  modified_base 10: mod_base = OTHER; note = 2' Fluoro-cytidine
  modified_base 11: mod_base = um
  modified_base 12: mod_base = OTHER; note = 2' Fluoro-uridine
  modified_base 13: mod_base = gm
  modified_base 14: mod_base = OTHER; note = 2' Fluoro-uridine
  modified_base 15: mod_base = gm
  modified_base 16: mod_base = OTHER; note = 2' Fluoro-guanosine
  modified_base 17: mod_base = OTHER; note = 2'O-methyl-adenosine
  modified_base 18: mod_base = OTHER; note = 2' Fluoro-uridine
  modified_base 19: mod_base = gm
  modified_base 1^2: mod_base = OTHER; note = phosphorothioate linkage
  modified_base 2^3: mod_base = OTHER; note = phosphorothioate linkage
  modified_base 17^18: mod_base = OTHER; note = phosphorothioate linkage
  modified_base 18^19: mod_base = OTHER; note = phosphorothioate linkage
atcaaaatccttgtggatg

SEQ ID NO: 479 - RNA, 19 nt, synthetic construct
  source 1..19: mol_type = other RNA
  misc_feature 1..19: note = Antisense: ETXS866; corresponding to SEQ ID NO: 239
  modified_base 1: mod_base = um
  modified_base 2: mod_base = OTHER; note = 2' Fluoro-uridine
  modified_base 3: mod_base = cm
  modified_base 4: mod_base = OTHER; note = 2'Fluoro-adenosine
  modified_base 5: mod_base = gm
  modified_base 6: mod_base = OTHER; note = 2' Fluoro-guanosine
  modified_base 7: mod_base = OTHER; note = 2'O-methyl-adenosine
  modified_base 8: mod_base = OTHER; note = 2' Fluoro-uridine
  modified_base 9: mod_base = um
  modified_base 10: mod_base = OTHER; note = 2'Fluoro-adenosine
  modified_base 11: mod_base = OTHER; note = 2'O-methyl-adenosine
  modified_base 12: mod_base = OTHER; note = 2' Fluoro-uridine
  modified_base 13: mod_base = cm
  modified_base 14: mod_base = OTHER; note = 2' Fluoro-uridine
  modified_base 15: mod_base = cm
  modified_base 16: mod_base = OTHER; note = 2'Fluoro-adenosine
  modified_base 17: mod_base = um
  modified_base 18: mod_base = OTHER; note = 2' Fluoro-cytidine
  modified_base 19: mod_base = OTHER; note = 2'O-methyl-adenosine
  modified_base 1^2: mod_base = OTHER; note = phosphorothioate linkage
  modified_base 2^3: mod_base = OTHER; note = phosphorothioate linkage
  modified_base 17^18: mod_base = OTHER; note = phosphorothioate linkage
  modified_base 18^19: mod_base = OTHER; note = phosphorothioate linkage
ttcaggattaatctcatca

SEQ ID NO: 480 - RNA, 19 nt, synthetic construct
  source 1..19: mol_type = other RNA
  misc_feature 1..19: note = Antisense: ETXS868; corresponding to SEQ ID NO: 240
  modified_base 1: mod_base = OTHER; note = 2'O-methyl-adenosine
  modified_base 2: mod_base = OTHER; note = 2'Fluoro-adenosine
  modified_base 3: mod_base = um
  modified_base 4: mod_base = OTHER; note = 2' Fluoro-cytidine
  modified_base 5: mod_base = cm
  modified_base 6: mod_base = OTHER; note = 2' Fluoro-uridine
  modified_base 7: mod_base = um
  modified_base 8: mod_base = OTHER; note = 2' Fluoro-guanosine
  modified_base 9: mod_base = um
  modified_base 10: mod_base = OTHER; note = 2' Fluoro-guanosine
  modified_base 11: mod_base = gm
  modified_base 12: mod_base = OTHER; note = 2'Fluoro-adenosine
  modified_base 13: mod_base = um
  modified_base 14: mod_base = OTHER; note = 2' Fluoro-guanosine
  modified_base 15: mod_base = OTHER; note = 2'O-methyl-adenosine
  modified_base 16: mod_base = OTHER; note = 2'Fluoro-adenosine
  modified_base 17: mod_base = gm
  modified_base 18: mod_base = OTHER; note = 2' Fluoro-guanosine
  modified_base 19: mod_base = cm
  modified_base 1^2: mod_base = OTHER; note = phosphorothioate linkage
  modified_base 2^3: mod_base = OTHER; note = phosphorothioate linkage
  modified_base 17^18: mod_base = OTHER; note = phosphorothioate linkage
  modified_base 18^19: mod_base = OTHER; note = phosphorothioate linkage
aatccttgtggatgaaggc

SEQ ID NO: 481 - RNA, 19 nt, synthetic construct
  source 1..19: mol_type = other RNA
  misc_feature 1..19: note = Antisense: ETXS870; corresponding to SEQ ID NO: 241
  modified_base 1: mod_base = cm
  modified_base 2: mod_base = OTHER; note = 2' Fluoro-cytidine
  modified_base 3: mod_base = OTHER; note = 2'O-methyl-adenosine
  modified_base 4: mod_base = OTHER; note = 2' Fluoro-uridine
  modified_base 5: mod_base = cm
  modified_base 6: mod_base = OTHER; note = 2' Fluoro-guanosine
  modified_base 7: mod_base = um
  modified_base 8: mod_base = OTHER; note = 2' Fluoro-guanosine
  modified_base 9: mod_base = cm
  modified_base 10: mod_base = OTHER; note = 2' Fluoro-cytidine
  modified_base 11: mod_base = um
  modified_base 12: mod_base = OTHER; note = 2' Fluoro-cytidine
  modified_base 13: mod_base = OTHER; note = 2'O-methyl-adenosine
  modified_base 14: mod_base = OTHER; note = 2' Fluoro-uridine
  modified_base 15: mod_base = gm
  modified_base 16: mod_base = OTHER; note = 2' Fluoro-guanosine
  modified_base 17: mod_base = OTHER; note = 2'O-methyl-adenosine
  modified_base 18: mod_base = OTHER; note = 2' Fluoro-guanosine
  modified_base 19: mod_base = OTHER; note = 2'O-methyl-adenosine
  modified_base 1^2: mod_base = OTHER; note = phosphorothioate linkage
  modified_base 2^3: mod_base = OTHER; note = phosphorothioate linkage
  modified_base 17^18: mod_base = OTHER; note = phosphorothioate linkage
  modified_base 18^19: mod_base = OTHER; note = phosphorothioate linkage
ccatcgtgcctcatggaga

SEQ ID NO: 482 - RNA, 23 nt, synthetic construct
  source 1..23: mol_type = other RNA
  misc_feature 1..23: note = Antisense: ETXS872; corresponding to SEQ ID NO: 122
  modified_base 1: mod_base = OTHER; note = 2'O-methyl-adenosine
  modified_base 2: mod_base = OTHER; note = 2'Fluoro-adenosine
  modified_base 3: mod_base = OTHER; note = 2'O-methyl-adenosine
  modified_base 4: mod_base = OTHER; note = 2' Fluoro-uridine
  modified_base 5: mod_base = cm
  modified_base 6: mod_base = OTHER; note = 2' Fluoro-cytidine
  modified_base 7: mod_base = um
  modified_base 8: mod_base = OTHER; note = 2' Fluoro-uridine
  modified_base 9: mod_base = OTHER; note = 2' Fluoro-guanosine
  modified_base 10: mod_base = um
  modified_base 11: mod_base = gm
  modified_base 12: mod_base = gm
  modified_base 13: mod_base = OTHER; note = 2'O-methyl-adenosine
  modified_base 14: mod_base = OTHER; note = 2' Fluoro-uridine
  modified_base 15: mod_base = gm
  modified_base 16: mod_base = OTHER; note = 2'Fluoro-adenosine
  modified_base 17: mod_base = OTHER; note = 2'O-methyl-adenosine
  modified_base 18: mod_base = gm
  modified_base 19: mod_base = gm
  modified_base 20: mod_base = cm
  modified_base 21: mod_base = OTHER; note = 2'O-methyl-adenosine
  modified_base 22: mod_base = OTHER; note = 2'O-methyl-adenosine
  modified_base 23: mod_base = OTHER; note = 2'O-methyl-adenosine
  modified_base 1^2: mod_base = OTHER; note = phosphorothioate linkage
  modified_base 2^3: mod_base = OTHER; note = phosphorothioate linkage
  modified_base 21^22: mod_base = OTHER; note = phosphorothioate linkage
  modified_base 22^23: mod_base = OTHER; note = phosphorothioate linkage
aaatccttgtggatgaaggcaaa

SEQ ID NO: 483 - RNA, 23 nt, synthetic construct
  source 1..23: mol_type = other RNA
  misc_feature 1..23: note = Antisense: ETXS874; corresponding to SEQ ID NO: 123
  modified_base 1: mod_base = gm
  modified_base 2: mod_base = OTHER; note = 2' Fluoro-cytidine
  modified_base 3: mod_base = cm
  modified_base 4: mod_base = OTHER; note = 2' Fluoro-uridine
  modified_base 5: mod_base = cm
  modified_base 6: mod_base = OTHER; note = 2'Fluoro-adenosine
  modified_base 7: mod_base = um
  modified_base 8: mod_base = OTHER; note = 2' Fluoro-guanosine
  modified_base 9: mod_base = OTHER; note = 2' Fluoro-guanosine
  modified_base 10: mod_base = OTHER; note = 2'O-methyl-adenosine
  modified_base 11: mod_base = gm
  modified_base 12: mod_base = OTHER; note = 2'O-methyl-adenosine
  modified_base 13: mod_base = um
  modified_base 14: mod_base = OTHER; note = 2' Fluoro-cytidine
  modified_base 15: mod_base = um
  modified_base 16: mod_base = OTHER; note = 2' Fluoro-uridine
  modified_base 17: mod_base = um
  modified_base 18: mod_base = cm
  modified_base 19: mod_base = gm
  modified_base 20: mod_base = cm
  modified_base 21: mod_base = OTHER; note = 2'O-methyl-adenosine
  modified_base 22: mod_base = gm
  modified_base 23: mod_base = cm
  modified_base 1^2: mod_base = OTHER; note = phosphorothioate linkage
  modified_base 2^3: mod_base = OTHER; note = phosphorothioate linkage
  modified_base 21^22: mod_base = OTHER; note = phosphorothioate linkage
  modified_base 22^23: mod_base = OTHER; note = phosphorothioate linkage
gcctcatggagatctttcgcagc

SEQ ID NO: 484 - RNA, 23 nt, synthetic construct
  source 1..23: mol_type = other RNA
  misc_feature 1..23: note = Antisense: ETXS876; corresponding to SEQ ID NO: 124
  modified_base 1: mod_base = um
  modified_base 2: mod_base = OTHER; note = 2' Fluoro-uridine
  modified_base 3: mod_base = cm
  modified_base 4: mod_base = OTHER; note = 2' Fluoro-uridine
  modified_base 5: mod_base = cm
  modified_base 6: mod_base = OTHER; note = 2' Fluoro-cytidine
  modified_base 7: mod_base = OTHER; note = 2'O-methyl-adenosine
  modified_base 8: mod_base = OTHER; note = 2' Fluoro-uridine
  modified_base 9: mod_base = OTHER; note = 2' Fluoro-guanosine
  modified_base 10: mod_base = OTHER; note = 2'O-methyl-adenosine
  modified_base 11: mod_base = gm
  modified_base 12: mod_base = gm
  modified_base 13: mod_base = OTHER; note = 2'O-methyl-adenosine
  modified_base 14: mod_base = OTHER; note = 2' Fluoro-cytidine
  modified_base 15: mod_base = cm
  modified_base 16: mod_base = OTHER; note = 2'Fluoro-adenosine
  modified_base 17: mod_base = cm
  modified_base 18: mod_base = cm
  modified_base 19: mod_base = OTHER; note = 2'O-methyl-adenosine
  modified_base 20: mod_base = gm
  modified_base 21: mod_base = cm
  modified_base 22: mod_base = OTHER; note = 2'O-methyl-adenosine
  modified_base 23: mod_base = um
  modified_base 1^2: mod_base = OTHER; note = phosphorothioate linkage
  modified_base 2^3: mod_base = OTHER; note = phosphorothioate linkage
  modified_base 21^22: mod_base = OTHER; note = phosphorothioate linkage
  modified_base 22^23: mod_base = OTHER; note = phosphorothioate linkage
ttctccatgaggaccaccagcat

SEQ ID NO: 485 - RNA, 23 nt, synthetic construct
  source 1..23: mol_type = other RNA
  misc_feature 1..23: note = Antisense: ETXS878; corresponding to SEQ ID NO: 125
  modified_base 1: mod_base = um
  modified_base 2: mod_base = OTHER; note = 2' Fluoro-guanosine
  modified_base 3: mod_base = cm
  modified_base 4: mod_base = OTHER; note = 2' Fluoro-cytidine
  modified_base 5: mod_base = um
  modified_base 6: mod_base = OTHER; note = 2' Fluoro-cytidine
  modified_base 7: mod_base = OTHER; note = 2'O-methyl-adenosine
  modified_base 8: mod_base = OTHER; note = 2' Fluoro-uridine
  modified_base 9: mod_base = OTHER; note = 2' Fluoro-guanosine
  modified_base 10: mod_base = gm
  modified_base 11: mod_base = OTHER; note = 2'O-methyl-adenosine
  modified_base 12: mod_base = gm
  modified_base 13: mod_base = OTHER; note = 2'O-methyl-adenosine
  modified_base 14: mod_base = OTHER; note = 2' Fluoro-uridine
  modified_base 15: mod_base = cm
  modified_base 16: mod_base = OTHER; note = 2' Fluoro-uridine
  modified_base 17: mod_base = um
  modified_base 18: mod_base = um
  modified_base 19: mod_base = cm
  modified_base 20: mod_base = gm
  modified_base 21: mod_base = cm
  modified_base 22: mod_base = OTHER; note = 2'O-methyl-adenosine
  modified_base 23: mod_base = gm
  modified_base 1^2: mod_base = OTHER; note = phosphorothioate linkage
  modified_base 2^3: mod_base = OTHER; note = phosphorothioate linkage
  modified_base 21^22: mod_base = OTHER; note = phosphorothioate linkage
  modified_base 22^23: mod_base = OTHER; note = phosphorothioate linkage
tgcctcatggagatctttcgcag

SEQ ID NO: 486 - RNA, 23 nt, synthetic construct
  source 1..23: mol_type = other RNA
  misc_feature 1..23: note = Antisense: ETXS880; corresponding to SEQ ID NO: 126
  modified_base 1: mod_base = OTHER; note = 2'O-methyl-adenosine
  modified_base 2: mod_base = OTHER; note = 2' Fluoro-guanosine
  modified_base 3: mod_base = cm
  modified_base 4: mod_base = OTHER; note = 2'Fluoro-adenosine
  modified_base 5: mod_base = gm
  modified_base 6: mod_base = OTHER; note = 2' Fluoro-cytidine
  modified_base 7: mod_base = um
  modified_base 8: mod_base = OTHER; note = 2' Fluoro-cytidine
  modified_base 9: mod_base = OTHER; note = 2'Fluoro-adenosine
  modified_base 10: mod_base = um
  modified_base 11: mod_base = gm
  modified_base 12: mod_base = cm
  modified_base 13: mod_base = OTHER; note = 2'O-methyl-adenosine
  modified_base 14: mod_base = OTHER; note = 2' Fluoro-uridine
  modified_base 15: mod_base = cm
  modified_base 16: mod_base = OTHER; note = 2' Fluoro-uridine
  modified_base 17: mod_base = cm
  modified_base 18: mod_base = OTHER; note = 2'O-methyl-adenosine
  modified_base 19: mod_base = um
  modified_base 20: mod_base = OTHER; note = 2'O-methyl-adenosine
  modified_base 21: mod_base = cm
  modified_base 22: mod_base = um
  modified_base 23: mod_base = um
  modified_base 1^2: mod_base = OTHER; note = phosphorothioate linkage
  modified_base 2^3: mod_base = OTHER; note = phosphorothioate linkage
  modified_base 21^22: mod_base = OTHER; note = phosphorothioate linkage
  modified_base 22^23: mod_base = OTHER; note = phosphorothioate linkage
agcagctcatgcatctcatactt

SEQ ID NO: 487 - RNA, 23 nt, synthetic construct
  source 1..23: mol_type = other RNA
  misc_feature 1..23: note = Antisense: ETXS882; corresponding to SEQ ID NO: 127
  modified_base 1: mod_base = um
  modified_base 2: mod_base = OTHER; note = 2' Fluoro-cytidine
  modified_base 3: mod_base = OTHER; note = 2'O-methyl-adenosine
  modified_base 4: mod_base = OTHER; note = 2' Fluoro-guanosine
  modified_base 5: mod_base = gm
  modified_base 6: mod_base = OTHER; note = 2'Fluoro-adenosine
  modified_base 7: mod_base = um
  modified_base 8: mod_base = OTHER; note = 2' Fluoro-uridine
  modified_base 9: mod_base = OTHER; note = 2'Fluoro-adenosine
  modified_base 10: mod_base = OTHER; note = 2'O-methyl-adenosine
  modified_base 11: mod_base = um
  modified_base 12: mod_base = cm
  modified_base 13: mod_base = um
  modified_base 14: mod_base = OTHER; note = 2' Fluoro-cytidine
  modified_base 15: mod_base = OTHER; note = 2'O-methyl-adenosine
  modified_base 16: mod_base = OTHER; note = 2' Fluoro-uridine
  modified_base 17: mod_base = cm
  modified_base 18: mod_base = OTHER; note = 2'O-methyl-adenosine
  modified_base 19: mod_base = OTHER; note = 2'O-methyl-adenosine
  modified_base 20: mod_base = OTHER; note = 2'O-methyl-adenosine
  modified_base 21: mod_base = cm
  modified_base 22: mod_base = OTHER; note = 2'O-methyl-adenosine
  modified_base 23: mod_base = gm
  modified_base 1^2: mod_base = OTHER; note = phosphorothioate linkage
  modified_base 2^3: mod_base = OTHER; note = phosphorothioate linkage
  modified_base 21^22: mod_base = OTHER; note = phosphorothioate linkage
  modified_base 22^23: mod_base = OTHER; note = phosphorothioate linkage
tcaggattaatctcatcaaacag

SEQ ID NO: 488 - RNA, 23 nt, synthetic construct
  source 1..23: mol_type = other RNA
  misc_feature 1..23: note = Antisense: ETXS884; corresponding to SEQ ID NO: 128
  modified_base 1: mod_base = um
  modified_base 2: mod_base = OTHER; note = 2' Fluoro-uridine
  modified_base 3: mod_base = gm
  modified_base 4: mod_base = OTHER; note = 2' Fluoro-guanosine
  modified_base 5: mod_base = um
  modified_base 6: mod_base = OTHER; note = 2' Fluoro-uridine
  modified_base 7: mod_base = um
  modified_base 8: mod_base = OTHER; note = 2' Fluoro-cytidine
  modified_base 9: mod_base = OTHER; note = 2'Fluoro-adenosine
  modified_base 10: mod_base = gm
  modified_base 11: mod_base = gm
  modified_base 12: mod_base = OTHER; note = 2'O-methyl-adenosine
  modified_base 13: mod_base = um
  modified_base 14: mod_base = OTHER; note = 2' Fluoro-uridine
  modified_base 15: mod_base = OTHER; note = 2'O-methyl-adenosine
  modified_base 16: mod_base = OTHER; note = 2'Fluoro-adenosine
  modified_base 17: mod_base = um
  modified_base 18: mod_base = cm
  modified_base 19: mod_base = um
  modified_base 20: mod_base = cm
  modified_base 21: mod_base = OTHER; note = 2'O-methyl-adenosine
  modified_base 22: mod_base = um
  modified_base 23: mod_base = cm
  modified_base 1^2: mod_base = OTHER; note = phosphorothioate linkage
  modified_base 2^3: mod_base = OTHER; note = phosphorothioate linkage
  modified_base 21^22: mod_base = OTHER; note = phosphorothioate linkage
  modified_base 22^23: mod_base = OTHER; note = phosphorothioate linkage
ttggtttcaggattaatctcatc

SEQ ID NO: 489 - RNA, 23 nt, synthetic construct
  source 1..23: mol_type = other RNA
  misc_feature 1..23: note = Antisense: ETXS886; corresponding to SEQ ID NO: 129
  modified_base 1: mod_base = gm
  modified_base 2: mod_base = OTHER; note = 2' Fluoro-uridine
  modified_base 3: mod_base = um
  modified_base 4: mod_base = OTHER; note = 2' Fluoro-uridine
  modified_base 5: mod_base = cm
  modified_base 6: mod_base = OTHER; note = 2'Fluoro-adenosine
  modified_base 7: mod_base = gm
  modified_base 8: mod_base = OTHER; note = 2' Fluoro-guanosine
  modified_base 9: mod_base = OTHER; note = 2'Fluoro-adenosine
  modified_base 10: mod_base = um
  modified_base 11: mod_base = um
  modified_base 12: mod_base = OTHER; note = 2'O-methyl-adenosine
  modified_base 13: mod_base = OTHER; note = 2'O-methyl-adenosine
  modified_base 14: mod_base = OTHER; note = 2' Fluoro-uridine
  modified_base 15: mod_base = cm
  modified_base 16: mod_base = OTHER; note = 2' Fluoro-uridine
  modified_base 17: mod_base = cm
  modified_base 18: mod_base = OTHER; note = 2'O-methyl-adenosine
  modified_base 19: mod_base = um
  modified_base 20: mod_base = cm
  modified_base 21: mod_base = OTHER; note = 2'O-methyl-adenosine
  modified_base 22: mod_base = OTHER; note = 2'O-methyl-adenosine
  modified_base 23: mod_base = OTHER; note = 2'O-methyl-adenosine
  modified_base 1^2: mod_base = OTHER; note = phosphorothioate linkage
  modified_base 2^3: mod_base = OTHER; note = phosphorothioate linkage
  modified_base 21^22: mod_base = OTHER; note = phosphorothioate linkage
  modified_base 22^23: mod_base = OTHER; note = phosphorothioate linkage
gtttcaggattaatctcatcaaa

SEQ ID NO: 490 - RNA, 23 nt, synthetic construct
  source 1..23: mol_type = other RNA
  misc_feature 1..23: note = Antisense: ETXS888; corresponding to SEQ ID NO: 130
  modified_base 1: mod_base = um
  modified_base 2: mod_base = OTHER; note = 2' Fluoro-guanosine
  modified_base 3: mod_base = gm
  modified_base 4: mod_base = OTHER; note = 2' Fluoro-uridine
  modified_base 5: mod_base = um
  modified_base 6: mod_base = OTHER; note = 2' Fluoro-uridine
  modified_base 7: mod_base = cm
  modified_base 8: mod_base = OTHER; note = 2'Fluoro-adenosine
  modified_base 9: mod_base = OTHER; note = 2' Fluoro-guanosine
  modified_base 10: mod_base = gm
  modified_base 11: mod_base = OTHER; note = 2'O-methyl-adenosine
  modified_base 12: mod_base = um
  modified_base 13: mod_base = um
  modified_base 14: mod_base = OTHER; note = 2'Fluoro-adenosine
  modified_base 15: mod_base = OTHER; note = 2'O-methyl-adenosine
  modified_base 16: mod_base = OTHER; note = 2' Fluoro-uridine
  modified_base 17: mod_base = cm
  modified_base 18: mod_base = um
  modified_base 19: mod_base = cm
  modified_base 20: mod_base = OTHER; note = 2'O-methyl-adenosine
  modified_base 21: mod_base = um
  modified_base 22: mod_base = cm
  modified_base 23: mod_base = OTHER; note = 2'O-methyl-adenosine
  modified_base 1^2: mod_base = OTHER; note = phosphorothioate linkage
  modified_base 2^3: mod_base = OTHER; note = phosphorothioate linkage
  modified_base 21^22: mod_base = OTHER; note = phosphorothioate linkage
  modified_base 22^23: mod_base = OTHER; note = phosphorothioate linkage
tggtttcaggattaatctcatca

SEQ ID NO: 491 - RNA, 23 nt, synthetic construct
  source 1..23: mol_type = other RNA
  misc_feature 1..23: note = Antisense: ETXS890; corresponding to SEQ ID NO: 131
  modified_base 1: mod_base = gm
  modified_base 2: mod_base = OTHER; note = 2' Fluoro-guanosine
  modified_base 3: mod_base = um
  modified_base 4: mod_base = OTHER; note = 2' Fluoro-uridine
  modified_base 5: mod_base = um
  modified_base 6: mod_base = OTHER; note = 2' Fluoro-cytidine
  modified_base 7: mod_base = OTHER; note = 2'O-methyl-adenosine
  modified_base 8: mod_base = OTHER; note = 2' Fluoro-guanosine
  modified_base 9: mod_base = OTHER; note = 2' Fluoro-guanosine
  modified_base 10: mod_base = OTHER; note = 2'O-methyl-adenosine
  modified_base 11: mod_base = um
  modified_base 12: mod_base = um
  modified_base 13: mod_base = OTHER; note = 2'O-methyl-adenosine
  modified_base 14: mod_base = OTHER; note = 2'Fluoro-adenosine
  modified_base 15: mod_base = um
  modified_base 16: mod_base = OTHER; note = 2' Fluoro-cytidine
  modified_base 17: mod_base = um
  modified_base 18: mod_base = cm
  modified_base 19: mod_base = OTHER; note = 2'O-methyl-adenosine
  modified_base 20: mod_base = um
  modified_base 21: mod_base = cm
  modified_base 22: mod_base = OTHER; note = 2'O-methyl-adenosine
  modified_base 23: mod_base = OTHER; note = 2'O-methyl-adenosine
  modified_base 1^2: mod_base = OTHER; note = phosphorothioate linkage
  modified_base 2^3: mod_base = OTHER; note = phosphorothioate linkage
  modified_base 21^22: mod_base = OTHER; note = phosphorothioate linkage
  modified_base 22^23: mod_base = OTHER; note = phosphorothioate linkage
ggtttcaggattaatctcatcaa

SEQ ID NO: 492 - RNA, 23 nt, synthetic construct
  source 1..23: mol_type = other RNA
  misc_feature 1..23: note = Antisense: ETXS892; corresponding to SEQ ID NO: 132
  modified_base 1: mod_base = OTHER; note = 2'O-methyl-adenosine
  modified_base 2: mod_base = OTHER; note = 2' Fluoro-guanosine
  modified_base 3: mod_base = gm
  modified_base 4: mod_base = OTHER; note = 2'Fluoro-adenosine
  modified_base 5: mod_base = um
  modified_base 6: mod_base = OTHER; note = 2' Fluoro-uridine
  modified_base 7: mod_base = OTHER; note = 2'O-methyl-adenosine
  modified_base 8: mod_base = OTHER; note = 2'Fluoro-adenosine
  modified_base 9: mod_base = OTHER; note = 2' Fluoro-uridine
  modified_base 10: mod_base = cm
  modified_base 11: mod_base = um
  modified_base 12: mod_base = cm
  modified_base 13: mod_base = OTHER; note = 2'O-methyl-adenosine
  modified_base 14: mod_base = OTHER; note = 2' Fluoro-uridine
  modified_base 15: mod_base = cm
  modified_base 16: mod_base = OTHER; note = 2'Fluoro-adenosine
  modified_base 17: mod_base = OTHER; note = 2'O-methyl-adenosine
  modified_base 18: mod_base = OTHER; note = 2'O-methyl-adenosine
  modified_base 19: mod_base = cm
  modified_base 20: mod_base = OTHER; note = 2'O-methyl-adenosine
  modified_base 21: mod_base = gm
  modified_base 22: mod_base = um
  modified_base 23: mod_base = um
  modified_base 1^2: mod_base = OTHER; note = phosphorothioate linkage
  modified_base 2^3: mod_base = OTHER; note = phosphorothioate linkage
  modified_base 21^22: mod_base = OTHER; note = phosphorothioate linkage
  modified_base 22^23: mod_base = OTHER; note = phosphorothioate linkage
aggattaatctcatcaaacagtt

SEQ ID NO: 493 - RNA, 23 nt, synthetic construct
  source 1..23: mol_type = other RNA
  misc_feature 1..23: note = Antisense: ETXS894; corresponding to SEQ ID NO: 133
  modified_base 1: mod_base = um
  modified_base 2: mod_base = OTHER; note = 2' Fluoro-cytidine
  modified_base 3: mod_base = cm
  modified_base 4: mod_base = OTHER; note = 2' Fluoro-uridine
  modified_base 5: mod_base = um
  modified_base 6: mod_base = OTHER; note = 2' Fluoro-guanosine
  modified_base 7: mod_base = um
  modified_base 8: mod_base = OTHER; note = 2' Fluoro-guanosine
  modified_base 9: mod_base = OTHER; note = 2' Fluoro-guanosine
  modified_base 10: mod_base = OTHER; note = 2'O-methyl-adenosine
  modified_base 11: mod_base = um
  modified_base 12: mod_base = gm
  modified_base 13: mod_base = OTHER; note = 2'O-methyl-adenosine
  modified_base 14: mod_base = OTHER; note = 2'Fluoro-adenosine
  modified_base 15: mod_base = gm
  modified_base 16: mod_base = OTHER; note = 2' Fluoro-guanosine
  modified_base 17: mod_base = cm
  modified_base 18: mod_base = OTHER; note = 2'O-methyl-adenosine
  modified_base 19: mod_base = OTHER; note = 2'O-methyl-adenosine
  modified_base 20: mod_base = OTHER; note = 2'O-methyl-adenosine
  modified_base 21: mod_base = OTHER; note = 2'O-methyl-adenosine
  modified_base 22: mod_base = cm
  modified_base 23: mod_base = um
  modified_base 1^2: mod_base = OTHER; note = phosphorothioate linkage
  modified_base 2^3: mod_base = OTHER; note = phosphorothioate linkage
  modified_base 21^22: mod_base = OTHER; note = phosphorothioate linkage
  modified_base 22^23: mod_base = OTHER; note = phosphorothioate linkage
tccttgtggatgaaggcaaaact

SEQ ID NO: 494 - RNA, 23 nt, synthetic construct
  source 1..23: mol_type = other RNA
  misc_feature 1..23: note = Antisense: ETXS896; corresponding to SEQ ID NO: 134
  modified_base 1: mod_base = gm
  modified_base 2: mod_base = OTHER; note = 2' Fluoro-uridine
  modified_base 3: mod_base = gm
  modified_base 4: mod_base = OTHER; note = 2' Fluoro-cytidine
  modified_base 5: mod_base = cm
  modified_base 6: mod_base = OTHER; note = 2' Fluoro-uridine
  modified_base 7: mod_base = cm
  modified_base 8: mod_base = OTHER; note = 2'Fluoro-adenosine
  modified_base 9: mod_base = OTHER; note = 2' Fluoro-uridine
  modified_base 10: mod_base = gm
  modified_base 11: mod_base = gm
  modified_base 12: mod_base = OTHER; note = 2'O-methyl-adenosine
  modified_base 13: mod_base = gm
  modified_base 14: mod_base = OTHER; note = 2'Fluoro-adenosine
  modified_base 15: mod_base = um
  modified_base 16: mod_base = OTHER; note = 2' Fluoro-cytidine
  modified_base 17: mod_base = um
  modified_base 18: mod_base = um
  modified_base 19: mod_base = um
  modified_base 20: mod_base = cm
  modified_base 21: mod_base = gm
  modified_base 22: mod_base = cm
  modified_base 23: mod_base = OTHER; note = 2'O-methyl-adenosine
  modified_base 1^2: mod_base = OTHER; note = phosphorothioate linkage
  modified_base 2^3: mod_base = OTHER; note = phosphorothioate linkage
  modified_base 21^22: mod_base = OTHER; note = phosphorothioate linkage
  modified_base 22^23: mod_base = OTHER; note = phosphorothioate linkage
gtgcctcatggagatctttcgca

SEQ ID NO: 495 - RNA, 23 nt, synthetic construct
  source 1..23: mol_type = other RNA
  misc_feature 1..23: note = Antisense: ETXS898; corresponding to SEQ ID NO: 135
  modified_base 1: mod_base = um
  modified_base 2: mod_base = OTHER; note = 2' Fluoro-cytidine
  modified_base 3: mod_base = um
  modified_base 4: mod_base = OTHER; note = 2' Fluoro-cytidine
  modified_base 5: mod_base = cm
  modified_base 6: mod_base = OTHER; note = 2'Fluoro-adenosine
  modified_base 7: mod_base = um
  modified_base 8: mod_base = OTHER; note = 2' Fluoro-guanosine
  modified_base 9: mod_base = OTHER; note = 2'Fluoro-adenosine
  modified_base 10: mod_base = gm
  modified_base 11: mod_base = gm
  modified_base 12: mod_base = OTHER; note = 2'O-methyl-adenosine
  modified_base 13: mod_base = cm
  modified_base 14: mod_base = OTHER; note = 2' Fluoro-cytidine
  modified_base 15: mod_base = OTHER; note = 2'O-methyl-adenosine
  modified_base 16: mod_base = OTHER; note = 2' Fluoro-cytidine
  modified_base 17: mod_base = cm
  modified_base 18: mod_base = OTHER; note = 2'O-methyl-adenosine
  modified_base 19: mod_base = gm
  modified_base 20: mod_base = cm
  modified_base 21: mod_base = OTHER; note = 2'O-methyl-adenosine
  modified_base 22: mod_base = um
  modified_base 23: mod_base = gm
  modified_base 1^2: mod_base = OTHER; note = phosphorothioate linkage
  modified_base 2^3: mod_base = OTHER; note = phosphorothioate linkage
  modified_base 21^22: mod_base = OTHER; note = phosphorothioate linkage
  modified_base 22^23: mod_base = OTHER; note = phosphorothioate linkage
tctccatgaggaccaccagcatg

SEQ ID NO: 496 - RNA, 23 nt, synthetic construct
  source 1..23: mol_type = other RNA
  misc_feature 1..23: note = Antisense: ETXS900; corresponding to SEQ ID NO: 136
  modified_base 1: mod_base = cm
  modified_base 2: mod_base = OTHER; note = 2'Fluoro-adenosine
  modified_base 3: mod_base = OTHER; note = 2'O-methyl-adenosine
  modified_base 4: mod_base = OTHER; note = 2'Fluoro-adenosine
  modified_base 5: mod_base = OTHER; note = 2'O-methyl-adenosine
  modified_base 6: mod_base = OTHER; note = 2' Fluoro-uridine
  modified_base 7: mod_base = cm
  modified_base 8: mod_base = OTHER; note = 2' Fluoro-cytidine
  modified_base 9: mod_base = OTHER; note = 2' Fluoro-uridine
  modified_base 10: mod_base = um
  modified_base 11: mod_base = gm
  modified_base 12: mod_base = um
  modified_base 13: mod_base = gm
  modified_base 14: mod_base = OTHER; note = 2' Fluoro-guanosine
  modified_base 15: mod_base = OTHER; note = 2'O-methyl-adenosine
  modified_base 16: mod_base = OTHER; note = 2' Fluoro-uridine
  modified_base 17: mod_base = gm
  modified_base 18: mod_base = OTHER; note = 2'O-methyl-adenosine
  modified_base 19: mod_base = OTHER; note = 2'O-methyl-adenosine
  modified_base 20: mod_base = gm
  modified_base 21: mod_base = gm
  modified_base 22: mod_base = cm
  modified_base 23: mod_base = OTHER; note = 2'O-methyl-adenosine
  modified_base 1^2: mod_base = OTHER; note = phosphorothioate linkage
  modified_base 2^3: mod_base = OTHER; note = phosphorothioate linkage
  modified_base 21^22: mod_base = OTHER; note = phosphorothioate linkage
  modified_base 22^23: mod_base = OTHER; note = phosphorothioate linkage
caaaatccttgtggatgaaggca

SEQ ID NO: 497 - RNA, 23 nt, synthetic construct
  source 1..23: mol_type = other RNA
  misc_feature 1..23: note = Antisense: ETXS902; corresponding to SEQ ID NO: 137
  modified_base 1: mod_base = cm
  modified_base 2: mod_base = OTHER; note = 2' Fluoro-guanosine
  modified_base 3: mod_base = um
  modified_base 4: mod_base = OTHER; note = 2' Fluoro-guanosine
  modified_base 5: mod_base = cm
  modified_base 6: mod_base = OTHER; note = 2' Fluoro-cytidine
  modified_base 7: mod_base = um
  modified_base 8: mod_base = OTHER; note = 2' Fluoro-cytidine
  modified_base 9: mod_base = OTHER; note = 2'Fluoro-adenosine
  modified_base 10: mod_base = um
  modified_base 11: mod_base = gm
  modified_base 12: mod_base = gm
  modified_base 13: mod_base = OTHER; note = 2'O-methyl-adenosine
  modified_base 14: mod_base = OTHER; note = 2' Fluoro-guanosine
  modified_base 15: mod_base = OTHER; note = 2'O-methyl-adenosine
  modified_base 16: mod_base = OTHER; note = 2' Fluoro-uridine
  modified_base 17: mod_base = cm
  modified_base 18: mod_base = um
  modified_base 19: mod_base = um
  modified_base 20: mod_base = um
  modified_base 21: mod_base = cm
  modified_base 22: mod_base = gm
  modified_base 23: mod_base = cm
  modified_base 1^2: mod_base = OTHER; note = phosphorothioate linkage
  modified_base 2^3: mod_base = OTHER; note = phosphorothioate linkage
  modified_base 21^22: mod_base = OTHER; note = phosphorothioate linkage
  modified_base 22^23: mod_base = OTHER; note = phosphorothioate linkage
cgtgcctcatggagatctttcgc

SEQ ID NO: 498 - RNA, 23 nt, synthetic construct
  source 1..23: mol_type = other RNA
  misc_feature 1..23: note = Antisense: ETXS904; corresponding to SEQ ID NO: 138
  modified_base 1: mod_base = OTHER; note = 2'O-methyl-adenosine
  modified_base 2: mod_base = OTHER; note = 2' Fluoro-uridine
  modified_base 3: mod_base = cm
  modified_base 4: mod_base = OTHER; note = 2'Fluoro-adenosine
  modified_base 5: mod_base = OTHER; note = 2'O-methyl-adenosine
  modified_base 6: mod_base = OTHER; note = 2'Fluoro-adenosine
  modified_base 7: mod_base = OTHER; note = 2'O-methyl-adenosine
  modified_base 8: mod_base = OTHER; note = 2' Fluoro-uridine
  modified_base 9: mod_base = OTHER; note = 2' Fluoro-cytidine
  modified_base 10: mod_base = cm
  modified_base 11: mod_base = um
  modified_base 12: mod_base = um
  modified_base 13: mod_base = gm
  modified_base 14: mod_base = OTHER; note = 2' Fluoro-uridine
  modified_base 15: mod_base = gm
  modified_base 16: mod_base = OTHER; note = 2' Fluoro-guanosine
  modified_base 17: mod_base = OTHER; note = 2'O-methyl-adenosine
  modified_base 18: mod_base = um
  modified_base 19: mod_base = gm
  modified_base 20: mod_base = OTHER; note = 2'O-methyl-adenosine
  modified_base 21: mod_base = OTHER; note = 2'O-methyl-adenosine
  modified_base 22: mod_base = gm
  modified_base 23: mod_base = gm
  modified_base 1^2: mod_base = OTHER; note = phosphorothioate linkage
  modified_base 2^3: mod_base = OTHER; note = phosphorothioate linkage
  modified_base 21^22: mod_base = OTHER; note = phosphorothioate linkage
  modified_base 22^23: mod_base = OTHER; note = phosphorothioate linkage
atcaaaatccttgtggatgaagg

SEQ ID NO: 499 - RNA, 23 nt, synthetic construct
  source 1..23: mol_type = other RNA
  misc_feature 1..23: note = Antisense: ETXS906; corresponding to SEQ ID NO: 139
  modified_base 1: mod_base = um
  modified_base 2: mod_base = OTHER; note = 2' Fluoro-uridine
  modified_base 3: mod_base = cm
  modified_base 4: mod_base = OTHER; note = 2'Fluoro-adenosine
  modified_base 5: mod_base = gm
  modified_base 6: mod_base = OTHER; note = 2' Fluoro-guanosine
  modified_base 7: mod_base = OTHER; note = 2'O-methyl-adenosine
  modified_base 8: mod_base = OTHER; note = 2' Fluoro-uridine
  modified_base 9: mod_base = OTHER; note = 2' Fluoro-uridine
  modified_base 10: mod_base = OTHER; note = 2'O-methyl-adenosine
  modified_base 11: mod_base = OTHER; note = 2'O-methyl-adenosine
  modified_base 12: mod_base = um
  modified_base 13: mod_base = cm
  modified_base 14: mod_base = OTHER; note = 2' Fluoro-uridine
  modified_base 15: mod_base = cm
  modified_base 16: mod_base = OTHER; note = 2'Fluoro-adenosine
  modified_base 17: mod_base = um
  modified_base 18: mod_base = cm
  modified_base 19: mod_base = OTHER; note = 2'O-methyl-adenosine
  modified_base 20: mod_base = OTHER; note = 2'O-methyl-adenosine
  modified_base 21: mod_base = OTHER; note = 2'O-methyl-adenosine
  modified_base 22: mod_base = cm
  modified_base 23: mod_base = OTHER; note = 2'O-methyl-adenosine
  modified_base 1^2: mod_base = OTHER; note = phosphorothioate linkage
  modified_base 2^3: mod_base = OTHER; note = phosphorothioate linkage
  modified_base 21^22: mod_base = OTHER; note = phosphorothioate linkage
  modified_base 22^23: mod_base = OTHER; note = phosphorothioate linkage
ttcaggattaatctcatcaaaca

SEQ ID NO: 500 - RNA, 23 nt, synthetic construct
  source 1..23: mol_type = other RNA
  misc_feature 1..23: note = Antisense: ETXS908; corresponding to SEQ ID NO: 140
  modified_base 1: mod_base = OTHER; note = 2'O-methyl-adenosine
  modified_base 2: mod_base = OTHER; note = 2'Fluoro-adenosine
  modified_base 3: mod_base = um
  modified_base 4: mod_base = OTHER; note = 2' Fluoro-cytidine
  modified_base 5: mod_base = cm
  modified_base 6: mod_base = OTHER; note = 2' Fluoro-uridine
  modified_base 7: mod_base = um
  modified_base 8: mod_base = OTHER; note = 2' Fluoro-guanosine
  modified_base 9: mod_base = OTHER; note = 2' Fluoro-uridine
  modified_base 10: mod_base = gm
  modified_base 11: mod_base = gm
  modified_base 12: mod_base = OTHER; note = 2'O-methyl-adenosine
  modified_base 13: mod_base = um
  modified_base 14: mod_base = OTHER; note = 2' Fluoro-guanosine
  modified_base 15: mod_base = OTHER; note = 2'O-methyl-adenosine
  modified_base 16: mod_base = OTHER; note = 2'Fluoro-adenosine
  modified_base 17: mod_base = gm
  modified_base 18: mod_base = gm
  modified_base 19: mod_base = cm
  modified_base 20: mod_base = OTHER; note = 2'O-methyl-adenosine
  modified_base 21: mod_base = OTHER; note = 2'O-methyl-adenosine
  modified_base 22: mod_base = OTHER; note = 2'O-methyl-adenosine
  modified_base 23: mod_base = OTHER; note = 2'O-methyl-adenosine
  modified_base 1^2: mod_base = OTHER; note = phosphorothioate linkage
  modified_base 2^3: mod_base = OTHER; note = phosphorothioate linkage
  modified_base 21^22: mod_base = OTHER; note = phosphorothioate linkage
  modified_base 22^23: mod_base = OTHER; note = phosphorothioate linkage
aatccttgtggatgaaggcaaaa

SEQ ID NO: 501 - RNA, 23 nt, synthetic construct
  source 1..23: mol_type = other RNA
  misc_feature 1..23: note = Antisense: ETXS910; corresponding to SEQ ID NO: 141
  modified_base 1: mod_base = cm
  modified_base 2: mod_base = OTHER; note = 2' Fluoro-cytidine
  modified_base 3: mod_base = OTHER; note = 2'O-methyl-adenosine
  modified_base 4: mod_base = OTHER; note = 2' Fluoro-uridine
  modified_base 5: mod_base = cm
  modified_base 6: mod_base = OTHER; note = 2' Fluoro-guanosine
  modified_base 7: mod_base = um
  modified_base 8: mod_base = OTHER; note = 2' Fluoro-guanosine
  modified_base 9: mod_base = OTHER; note = 2' Fluoro-cytidine
  modified_base 10: mod_base = cm
  modified_base 11: mod_base = um
  modified_base 12: mod_base = cm
  modified_base 13: mod_base = OTHER; note = 2'O-methyl-adenosine
  modified_base 14: mod_base = OTHER; note = 2' Fluoro-uridine
  modified_base 15: mod_base = gm
  modified_base 16: mod_base = OTHER; note = 2' Fluoro-guanosine
  modified_base 17: mod_base = OTHER; note = 2'O-methyl-adenosine
  modified_base 18: mod_base = gm
  modified_base 19: mod_base = OTHER; note = 2'O-methyl-adenosine
  modified_base 20: mod_base = um
  modified_base 21: mod_base = cm
  modified_base 22: mod_base = um
  modified_base 23: mod_base = um
  modified_base 1^2: mod_base = OTHER; note = phosphorothioate linkage
  modified_base 2^3: mod_base = OTHER; note = phosphorothioate linkage
  modified_base 21^22: mod_base = OTHER; note = phosphorothioate linkage
  modified_base 22^23: mod_base = OTHER; note = phosphorothioate linkage
ccatcgtgcctcatggagatctt

SEQ ID NO: 502 - RNA, 23 nt, synthetic construct
  source 1..23: mol_type = other RNA
  misc_feature 1..23: note = Antisense: ETXS912; corresponding to SEQ ID NO: 122
  modified_base 1: mod_base = OTHER; note = 2'O-methyl-adenosine
  modified_base 2: mod_base = OTHER; note = 2'Fluoro-adenosine
  modified_base 3: mod_base = OTHER; note = 2'O-methyl-adenosine
  modified_base 4: mod_base = OTHER; note = 2' Fluoro-uridine
  modified_base 5: mod_base = cm
  modified_base 6: mod_base = OTHER; note = 2' Fluoro-cytidine
  modified_base 7: mod_base = um
  modified_base 8: mod_base = OTHER; note = 2' Fluoro-uridine
  modified_base 9: mod_base = OTHER; note = 2' Fluoro-guanosine
  modified_base 10: mod_base = um
  modified_base 11: mod_base = gm
  modified_base 12: mod_base = gm
  modified_base 13: mod_base = OTHER; note = 2'O-methyl-adenosine
  modified_base 14: mod_base = OTHER; note = 2' Fluoro-uridine
  modified_base 15: mod_base = gm
  modified_base 16: mod_base = OTHER; note = 2'Fluoro-adenosine
  modified_base 17: mod_base = OTHER; note = 2'O-methyl-adenosine
  modified_base 18: mod_base = gm
  modified_base 19: mod_base = gm
  modified_base 20: mod_base = cm
  modified_base 21: mod_base = OTHER; note = 2'O-methyl-adenosine
  modified_base 22: mod_base = OTHER; note = 2'O-methyl-adenosine
  modified_base 23: mod_base = OTHER; note = 2'O-methyl-adenosine
  modified_base 1^2: mod_base = OTHER; note = phosphorothioate linkage
  modified_base 2^3: mod_base = OTHER; note = phosphorothioate linkage
  modified_base 21^22: mod_base = OTHER; note = phosphorothioate linkage
  modified_base 22^23: mod_base = OTHER; note = phosphorothioate linkage
aaatccttgtggatgaaggcaaa

SEQ ID NO: 503 - RNA, 23 nt, synthetic construct
  source 1..23: mol_type = other RNA
  misc_feature 1..23: note = Antisense: ETXS914; corresponding to SEQ ID NO: 123
  modified_base 1: mod_base = gm
  modified_base 2: mod_base = OTHER; note = 2' Fluoro-cytidine
  modified_base 3: mod_base = cm
  modified_base 4: mod_base = OTHER; note = 2' Fluoro-uridine
  modified_base 5: mod_base = cm
  modified_base 6: mod_base = OTHER; note = 2'Fluoro-adenosine
  modified_base 7: mod_base = um
  modified_base 8: mod_base = OTHER; note = 2' Fluoro-guanosine
  modified_base 9: mod_base = OTHER; note = 2' Fluoro-guanosine
  modified_base 10: mod_base = OTHER; note = 2'O-methyl-adenosine
  modified_base 11: mod_base = gm
  modified_base 12: mod_base = OTHER; note = 2'O-methyl-adenosine
  modified_base 13: mod_base = um
  modified_base 14: mod_base = OTHER; note = 2' Fluoro-cytidine
  modified_base 15: mod_base = um
  modified_base 16: mod_base = OTHER; note = 2' Fluoro-uridine
  modified_base 17: mod_base = um
  modified_base 18: mod_base = cm
  modified_base 19: mod_base = gm
  modified_base 20: mod_base = cm
  modified_base 21: mod_base = OTHER; note = 2'O-methyl-adenosine
  modified_base 22: mod_base = gm
  modified_base 23: mod_base = cm
  modified_base 1^2: mod_base = OTHER; note = phosphorothioate linkage
  modified_base 2^3: mod_base = OTHER; note = phosphorothioate linkage
  modified_base 21^22: mod_base = OTHER; note = phosphorothioate linkage
  modified_base 22^23: mod_base = OTHER; note = phosphorothioate linkage
gcctcatggagatctttcgcagc

SEQ ID NO: 504 - RNA, 23 nt, synthetic construct
  source 1..23: mol_type = other RNA
  misc_feature 1..23: note = Antisense: ETXS916; corresponding to SEQ ID NO: 124
  modified_base 1: mod_base = um
  modified_base 2: mod_base = OTHER; note = 2' Fluoro-uridine
  modified_base 3: mod_base = cm
  modified_base 4: mod_base = OTHER; note = 2' Fluoro-uridine
  modified_base 5: mod_base = cm
  modified_base 6: mod_base = OTHER; note = 2' Fluoro-cytidine
  modified_base 7: mod_base = OTHER; note = 2'O-methyl-adenosine
  modified_base 8: mod_base = OTHER; note = 2' Fluoro-uridine
  modified_base 9: mod_base = OTHER; note = 2' Fluoro-guanosine
  modified_base 10: mod_base = OTHER; note = 2'O-methyl-adenosine
  modified_base 11: mod_base = gm
  modified_base 12: mod_base = gm
  modified_base 13: mod_base = OTHER; note = 2'O-methyl-adenosine
  modified_base 14: mod_base = OTHER; note = 2' Fluoro-cytidine
  modified_base 15: mod_base = cm
  modified_base 16: mod_base = OTHER; note = 2'Fluoro-adenosine
  modified_base 17: mod_base = cm
  modified_base 18: mod_base = cm
  modified_base 19: mod_base = OTHER; note = 2'O-methyl-adenosine
  modified_base 20: mod_base = gm
  modified_base 21: mod_base = cm
  modified_base 22: mod_base = OTHER; note = 2'O-methyl-adenosine
  modified_base 23: mod_base = um
  modified_base 1^2: mod_base = OTHER; note = phosphorothioate linkage
  modified_base 2^3: mod_base = OTHER; note = phosphorothioate linkage
  modified_base 21^22: mod_base = OTHER; note = phosphorothioate linkage
  modified_base 22^23: mod_base = OTHER; note = phosphorothioate linkage
ttctccatgaggaccaccagcat

SEQ ID NO: 505 - RNA, 23 nt, synthetic construct
  source 1..23: mol_type = other RNA
  misc_feature 1..23: note = Antisense: ETXS918; corresponding to SEQ ID NO: 125
  modified_base 1: mod_base = um
  modified_base 2: mod_base = OTHER; note = 2' Fluoro-guanosine
  modified_base 3: mod_base = cm
  modified_base 4: mod_base = OTHER; note = 2' Fluoro-cytidine
  modified_base 5: mod_base = um
  modified_base 6: mod_base = OTHER; note = 2' Fluoro-cytidine
  modified_base 7: mod_base = OTHER; note = 2'O-methyl-adenosine
  modified_base 8: mod_base = OTHER; note = 2' Fluoro-uridine
  modified_base 9: mod_base = OTHER; note = 2' Fluoro-guanosine
  modified_base 10: mod_base = gm
  modified_base 11: mod_base = OTHER; note = 2'O-methyl-adenosine
  modified_base 12: mod_base = gm
  modified_base 13: mod_base = OTHER; note = 2'O-methyl-adenosine
  modified_base 14: mod_base = OTHER; note = 2' Fluoro-uridine
  modified_base 15: mod_base = cm
  modified_base 16: mod_base = OTHER; note = 2' Fluoro-uridine
  modified_base 17: mod_base = um
  modified_base 18: mod_base = um
  modified_base 19: mod_base = cm
  modified_base 20: mod_base = gm
  modified_base 21: mod_base = cm
  modified_base 22: mod_base = OTHER; note = 2'O-methyl-adenosine
  modified_base 23: mod_base = gm
  modified_base 1^2: mod_base = OTHER; note = phosphorothioate linkage
  modified_base 2^3: mod_base = OTHER; note = phosphorothioate linkage
  modified_base 21^22: mod_base = OTHER; note = phosphorothioate linkage
  modified_base 22^23: mod_base = OTHER; note = phosphorothioate linkage
tgcctcatggagatctttcgcag

SEQ ID NO: 506 - RNA, 23 nt, synthetic construct
  source 1..23: mol_type = other RNA
  misc_feature 1..23: note = Antisense: ETXS920; corresponding to SEQ ID NO: 126
  modified_base 1: mod_base = OTHER; note = 2'O-methyl-adenosine
  modified_base 2: mod_base = OTHER; note = 2' Fluoro-guanosine
  modified_base 3: mod_base = cm
  modified_base 4: mod_base = OTHER; note = 2'Fluoro-adenosine
  modified_base 5: mod_base = gm
  modified_base 6: mod_base = OTHER; note = 2' Fluoro-cytidine
  modified_base 7: mod_base = um
  modified_base 8: mod_base = OTHER; note = 2' Fluoro-cytidine
  modified_base 9: mod_base = OTHER; note = 2'Fluoro-adenosine
  modified_base 10: mod_base = um
  modified_base 11: mod_base = gm
  modified_base 12: mod_base = cm
  modified_base 13: mod_base = OTHER; note = 2'O-methyl-adenosine
  modified_base 14: mod_base = OTHER; note = 2' Fluoro-uridine
  modified_base 15: mod_base = cm
  modified_base 16: mod_base = OTHER; note = 2' Fluoro-uridine
  modified_base 17: mod_base = cm
  modified_base 18: mod_base = OTHER; note = 2'O-methyl-adenosine
  modified_base 19: mod_base = um
  modified_base 20: mod_base = OTHER; note = 2'O-methyl-adenosine
  modified_base 21: mod_base = cm
  modified_base 22: mod_base = um
  modified_base 23: mod_base = um
  modified_base 1^2: mod_base = OTHER; note = phosphorothioate linkage
  modified_base 2^3: mod_base = OTHER; note = phosphorothioate linkage
  modified_base 21^22: mod_base = OTHER; note = phosphorothioate linkage
  modified_base 22^23: mod_base = OTHER; note = phosphorothioate linkage
agcagctcatgcatctcatactt

SEQ ID NO: 507 - RNA, 23 nt, synthetic construct
  source 1..23: mol_type = other RNA
  misc_feature 1..23: note = Antisense: ETXS922; corresponding to SEQ ID NO: 127
  modified_base 1: mod_base = um
  modified_base 2: mod_base = OTHER; note = 2' Fluoro-cytidine
  modified_base 3: mod_base = OTHER; note = 2'O-methyl-adenosine
  modified_base 4: mod_base = OTHER; note = 2' Fluoro-guanosine
  modified_base 5: mod_base = gm
  modified_base 6: mod_base = OTHER; note = 2'Fluoro-adenosine
  modified_base 7: mod_base = um
  modified_base 8: mod_base = OTHER; note = 2' Fluoro-uridine
  modified_base 9: mod_base = OTHER; note = 2'Fluoro-adenosine
  modified_base 10: mod_base = OTHER; note = 2'O-methyl-adenosine
  modified_base 11: mod_base = um
  modified_base 12: mod_base = cm
  modified_base 13: mod_base = um
  modified_base 14: mod_base = OTHER; note = 2' Fluoro-cytidine
  modified_base 15: mod_base = OTHER; note = 2'O-methyl-adenosine
  modified_base 16: mod_base = OTHER; note = 2' Fluoro-uridine
  modified_base 17: mod_base = cm
  modified_base 18: mod_base = OTHER; note = 2'O-methyl-adenosine
  modified_base 19: mod_base = OTHER; note = 2'O-methyl-adenosine
  modified_base 20: mod_base = OTHER; note = 2'O-methyl-adenosine
  modified_base 21: mod_base = cm
  modified_base 22: mod_base = OTHER; note = 2'O-methyl-adenosine
  modified_base 23: mod_base = gm
  modified_base 1^2: mod_base = OTHER; note = phosphorothioate linkage
  modified_base 2^3: mod_base = OTHER; note = phosphorothioate linkage
  modified_base 21^22: mod_base = OTHER; note = phosphorothioate linkage
  modified_base 22^23: mod_base = OTHER; note = phosphorothioate linkage
tcaggattaatctcatcaaacag

SEQ ID NO: 508 - RNA, 23 nt, synthetic construct
  source 1..23: mol_type = other RNA
  misc_feature 1..23: note = Antisense: ETXS924; corresponding to SEQ ID NO: 128
  modified_base 1: mod_base = um
  modified_base 2: mod_base = OTHER; note = 2' Fluoro-uridine
  modified_base 3: mod_base = gm
  modified_base 4: mod_base = OTHER; note = 2' Fluoro-guanosine
  modified_base 5: mod_base = um
  modified_base 6: mod_base = OTHER; note = 2' Fluoro-uridine
  modified_base 7: mod_base = um
  modified_base 8: mod_base = OTHER; note = 2' Fluoro-cytidine
  modified_base 9: mod_base = OTHER; note = 2'Fluoro-adenosine
  modified_base 10: mod_base = gm
  modified_base 11: mod_base = gm
  modified_base 12: mod_base = OTHER; note = 2'O-methyl-adenosine
  modified_base 13: mod_base = um
  modified_base 14: mod_base = OTHER; note = 2' Fluoro-uridine
  modified_base 15: mod_base = OTHER; note = 2'O-methyl-adenosine
  modified_base 16: mod_base = OTHER; note = 2'Fluoro-adenosine
  modified_base 17: mod_base = um
  modified_base 18: mod_base = cm
  modified_base 19: mod_base = um
  modified_base 20: mod_base = cm
  modified_base 21: mod_base = OTHER; note = 2'O-methyl-adenosine
  modified_base 22: mod_base = um
  modified_base 23: mod_base = cm
  modified_base 1^2: mod_base = OTHER; note = phosphorothioate linkage
  modified_base 2^3: mod_base = OTHER; note = phosphorothioate linkage
  modified_base 21^22: mod_base = OTHER; note = phosphorothioate linkage
  modified_base 22^23: mod_base = OTHER; note = phosphorothioate linkage
ttggtttcaggattaatctcatc

SEQ ID NO: 509 - RNA, 23 nt, synthetic construct
  source 1..23: mol_type = other RNA
  misc_feature 1..23: note = Antisense: ETXS926; corresponding to SEQ ID NO: 129
  modified_base 1: mod_base = gm
  modified_base 2: mod_base = OTHER; note = 2' Fluoro-uridine
  modified_base 3: mod_base = um
  modified_base 4: mod_base = OTHER; note = 2' Fluoro-uridine
  modified_base 5: mod_base = cm
  modified_base 6: mod_base = OTHER; note = 2'Fluoro-adenosine
  modified_base 7: mod_base = gm
  modified_base 8: mod_base = OTHER; note = 2' Fluoro-guanosine
  modified_base 9: mod_base = OTHER; note = 2'Fluoro-adenosine
  modified_base 10: mod_base = um
  modified_base 11: mod_base = um
  modified_base 12: mod_base = OTHER; note = 2'O-methyl-adenosine
  modified_base 13: mod_base = OTHER; note = 2'O-methyl-adenosine
  modified_base 14: mod_base = OTHER; note = 2' Fluoro-uridine
  modified_base 15: mod_base = cm
  modified_base 16: mod_base = OTHER; note = 2' Fluoro-uridine
  modified_base 17: mod_base = cm
  modified_base 18: mod_base = OTHER; note = 2'O-methyl-adenosine
  modified_base 19: mod_base = um
  modified_base 20: mod_base = cm
  modified_base 21: mod_base = OTHER; note = 2'O-methyl-adenosine
  modified_base 22: mod_base = OTHER; note = 2'O-methyl-adenosine
  modified_base 23: mod_base = OTHER; note = 2'O-methyl-adenosine
  modified_base 1^2: mod_base = OTHER; note = phosphorothioate linkage
  modified_base 2^3: mod_base = OTHER; note = phosphorothioate linkage
  modified_base 21^22: mod_base = OTHER; note = phosphorothioate linkage
  modified_base 22^23: mod_base = OTHER; note = phosphorothioate linkage
gtttcaggattaatctcatcaaa

SEQ ID NO: 510 - RNA, 23 nt, synthetic construct
  source 1..23: mol_type = other RNA
  misc_feature 1..23: note = Antisense: ETXS928; corresponding to SEQ ID NO: 130
  modified_base 1: mod_base = um
  modified_base 2: mod_base = OTHER; note = 2' Fluoro-guanosine
  modified_base 3: mod_base = gm
  modified_base 4: mod_base = OTHER; note = 2' Fluoro-uridine
  modified_base 5: mod_base = um
  modified_base 6: mod_base = OTHER; note = 2' Fluoro-uridine
  modified_base 7: mod_base = cm
  modified_base 8: mod_base = OTHER; note = 2'Fluoro-adenosine
  modified_base 9: mod_base = OTHER; note = 2' Fluoro-guanosine
  modified_base 10: mod_base = gm
  modified_base 11: mod_base = OTHER; note = 2'O-methyl-adenosine
  modified_base 12: mod_base = um
  modified_base 13: mod_base = um
  modified_base 14: mod_base = OTHER; note = 2'Fluoro-adenosine
  modified_base 15: mod_base = OTHER; note = 2'O-methyl-adenosine
  modified_base 16: mod_base = OTHER; note = 2' Fluoro-uridine
  modified_base 17: mod_base = cm
  modified_base 18: mod_base = um
  modified_base 19: mod_base = cm
  modified_base 20: mod_base = OTHER; note = 2'O-methyl-adenosine
  modified_base 21: mod_base = um
  modified_base 22: mod_base = cm
  modified_base 23: mod_base = OTHER; note = 2'O-methyl-adenosine
  modified_base 1^2: mod_base = OTHER; note = phosphorothioate linkage
  modified_base 2^3: mod_base = OTHER; note = phosphorothioate linkage
  modified_base 21^22: mod_base = OTHER; note = phosphorothioate linkage
  modified_base 22^23: mod_base = OTHER; note = phosphorothioate linkage
tggtttcaggattaatctcatca

SEQ ID NO: 511 - RNA, 23 nt, synthetic construct
  source 1..23: mol_type = other RNA
  misc_feature 1..23: note = Antisense: ETXS930; corresponding to SEQ ID NO: 131
  modified_base 1: mod_base = gm
  modified_base 2: mod_base = OTHER; note = 2' Fluoro-guanosine
  modified_base 3: mod_base = um
  modified_base 4: mod_base = OTHER; note = 2' Fluoro-uridine
  modified_base 5: mod_base = um
  modified_base 6: mod_base = OTHER; note = 2' Fluoro-cytidine
  modified_base 7: mod_base = OTHER; note = 2'O-methyl-adenosine
  modified_base 8: mod_base = OTHER; note = 2' Fluoro-guanosine
  modified_base 9: mod_base = OTHER; note = 2' Fluoro-guanosine
  modified_base 10: mod_base = OTHER; note = 2'O-methyl-adenosine
  modified_base 11: mod_base = um
  modified_base 12: mod_base = um
  modified_base 13: mod_base = OTHER; note = 2'O-methyl-adenosine
  modified_base 14: mod_base = OTHER; note = 2'Fluoro-adenosine
  modified_base 15: mod_base = um
  modified_base 16: mod_base = OTHER; note = 2' Fluoro-cytidine
  modified_base 17: mod_base = um
  modified_base 18: mod_base = cm
  modified_base 19: mod_base = OTHER; note = 2'O-methyl-adenosine
  modified_base 20: mod_base = um
  modified_base 21: mod_base = cm
  modified_base 22: mod_base = OTHER; note = 2'O-methyl-adenosine
  modified_base 23: mod_base = OTHER; note = 2'O-methyl-adenosine
  modified_base 1^2: mod_base = OTHER; note = phosphorothioate linkage
  modified_base 2^3: mod_base = OTHER; note = phosphorothioate linkage
  modified_base 21^22: mod_base = OTHER; note = phosphorothioate linkage
  modified_base 22^23: mod_base = OTHER; note = phosphorothioate linkage
ggtttcaggattaatctcatcaa

SEQ ID NO: 512 - RNA, 23 nt, synthetic construct
  source 1..23: mol_type = other RNA
  misc_feature 1..23: note = Antisense: ETXS932; corresponding to SEQ ID NO: 132
  modified_base 1: mod_base = OTHER; note = 2'O-methyl-adenosine
  modified_base 2: mod_base = OTHER; note = 2' Fluoro-guanosine
  modified_base 3: mod_base = gm
  modified_base 4: mod_base = OTHER; note = 2'Fluoro-adenosine
  modified_base 5: mod_base = um
  modified_base 6: mod_base = OTHER; note = 2' Fluoro-uridine
  modified_base 7: mod_base = OTHER; note = 2'O-methyl-adenosine
  modified_base 8: mod_base = OTHER; note = 2'Fluoro-adenosine
  modified_base 9: mod_base = OTHER; note = 2' Fluoro-uridine
  modified_base 10: mod_base = cm
  modified_base 11: mod_base = um
  modified_base 12: mod_base = cm
  modified_base 13: mod_base = OTHER; note = 2'O-methyl-adenosine
  modified_base 14: mod_base = OTHER; note = 2' Fluoro-uridine
  modified_base 15: mod_base = cm
  modified_base 16: mod_base = OTHER; note = 2'Fluoro-adenosine
  modified_base 17: mod_base = OTHER; note = 2'O-methyl-adenosine
  modified_base 18: mod_base = OTHER; note = 2'O-methyl-adenosine
  modified_base 19: mod_base = cm
  modified_base 20: mod_base = OTHER; note = 2'O-methyl-adenosine
  modified_base 21: mod_base = gm
  modified_base 22: mod_base = um
  modified_base 23: mod_base = um
  modified_base 1^2: mod_base = OTHER; note = phosphorothioate linkage
  modified_base 2^3: mod_base = OTHER; note = phosphorothioate linkage
  modified_base 21^22: mod_base = OTHER; note = phosphorothioate linkage
  modified_base 22^23: mod_base = OTHER; note = phosphorothioate linkage
aggattaatctcatcaaacagtt

SEQ ID NO: 513 - RNA, 23 nt, synthetic construct
  source 1..23: mol_type = other RNA
  misc_feature 1..23: note = Antisense: ETXS934; corresponding to SEQ ID NO: 133
  modified_base 1: mod_base = um
  modified_base 2: mod_base = OTHER; note = 2' Fluoro-cytidine
  modified_base 3: mod_base = cm
  modified_base 4: mod_base = OTHER; note = 2' Fluoro-uridine
  modified_base 5: mod_base = um
  modified_base 6: mod_base = OTHER; note = 2' Fluoro-guanosine
  modified_base 7: mod_base = um
  modified_base 8: mod_base = OTHER; note = 2' Fluoro-guanosine
  modified_base 9: mod_base = OTHER; note = 2' Fluoro-guanosine
  modified_base 10: mod_base = OTHER; note = 2'O-methyl-adenosine
  modified_base 11: mod_base = um
  modified_base 12: mod_base = gm
  modified_base 13: mod_base = OTHER; note = 2'O-methyl-adenosine
  modified_base 14: mod_base = OTHER; note = 2'Fluoro-adenosine
  modified_base 15: mod_base = gm
  modified_base 16: mod_base = OTHER; note = 2' Fluoro-guanosine
  modified_base 17: mod_base = cm
  modified_base 18: mod_base = OTHER; note = 2'O-methyl-adenosine
  modified_base 19: mod_base = OTHER; note = 2'O-methyl-adenosine
  modified_base 20: mod_base = OTHER; note = 2'O-methyl-adenosine
  modified_base 21: mod_base = OTHER; note = 2'O-methyl-adenosine
  modified_base 22: mod_base = cm
  modified_base 23: mod_base = um
  modified_base 1^2: mod_base = OTHER; note = phosphorothioate linkage
  modified_base 2^3: mod_base = OTHER; note = phosphorothioate linkage
  modified_base 21^22: mod_base = OTHER; note = phosphorothioate linkage
  modified_base 22^23: mod_base = OTHER; note = phosphorothioate linkage
tccttgtggatgaaggcaaaact

SEQ ID NO: 514 - RNA, 23 nt, synthetic construct
  source 1..23: mol_type = other RNA
  misc_feature 1..23: note = Antisense: ETXS936; corresponding to SEQ ID NO: 134
  modified_base 1: mod_base = gm
  modified_base 2: mod_base = OTHER; note = 2' Fluoro-uridine
  modified_base 3: mod_base = gm
  modified_base 4: mod_base = OTHER; note = 2' Fluoro-cytidine
  modified_base 5: mod_base = cm
  modified_base 6: mod_base = OTHER; note = 2' Fluoro-uridine
  modified_base 7: mod_base = cm
  modified_base 8: mod_base = OTHER; note = 2'Fluoro-adenosine
  modified_base 9: mod_base = OTHER; note = 2' Fluoro-uridine
  modified_base 10: mod_base = gm
  modified_base 11: mod_base = gm
  modified_base 12: mod_base = OTHER; note = 2'O-methyl-adenosine
  modified_base 13: mod_base = gm
  modified_base 14: mod_base = OTHER; note = 2'Fluoro-adenosine
  modified_base 15: mod_base = um
  modified_base 16: mod_base = OTHER; note = 2' Fluoro-cytidine
  modified_base 17: mod_base = um
  modified_base 18: mod_base = um
  modified_base 19: mod_base = um
  modified_base 20: mod_base = cm
  modified_base 21: mod_base = gm
  modified_base 22: mod_base = cm
  modified_base 23: mod_base = OTHER; note = 2'O-methyl-adenosine
  modified_base 1^2: mod_base = OTHER; note = phosphorothioate linkage
  modified_base 2^3: mod_base = OTHER; note = phosphorothioate linkage
  modified_base 21^22: mod_base = OTHER; note = phosphorothioate linkage
  modified_base 22^23: mod_base = OTHER; note = phosphorothioate linkage
gtgcctcatggagatctttcgca

SEQ ID NO: 515 - RNA, 23 nt, synthetic construct
  source 1..23: mol_type = other RNA
  misc_feature 1..23: note = Antisense: ETXS938; corresponding to SEQ ID NO: 135
  modified_base 1: mod_base = um
  modified_base 2: mod_base = OTHER; note = 2' Fluoro-cytidine
  modified_base 3: mod_base = um
  modified_base 4: mod_base = OTHER; note = 2' Fluoro-cytidine
  modified_base 5: mod_base = cm
  modified_base 6: mod_base = OTHER; note = 2'Fluoro-adenosine
  modified_base 7: mod_base = um
  modified_base 8: mod_base = OTHER; note = 2' Fluoro-guanosine
  modified_base 9: mod_base = OTHER; note = 2'Fluoro-adenosine
  modified_base 10: mod_base = gm
  modified_base 11: mod_base = gm
  modified_base 12: mod_base = OTHER; note = 2'O-methyl-adenosine
  modified_base 13: mod_base = cm
  modified_base 14: mod_base = OTHER; note = 2' Fluoro-cytidine
  modified_base 15: mod_base = OTHER; note = 2'O-methyl-adenosine
  modified_base 16: mod_base = OTHER; note = 2' Fluoro-cytidine
  modified_base 17: mod_base = cm
  modified_base 18: mod_base = OTHER; note = 2'O-methyl-adenosine
  modified_base 19: mod_base = gm
  modified_base 20: mod_base = cm
  modified_base 21: mod_base = OTHER; note = 2'O-methyl-adenosine
  modified_base 22: mod_base = um
  modified_base 23: mod_base = gm
  modified_base 1^2: mod_base = OTHER; note = phosphorothioate linkage
  modified_base 2^3: mod_base = OTHER; note = phosphorothioate linkage
  modified_base 21^22: mod_base = OTHER; note = phosphorothioate linkage
  modified_base 22^23: mod_base = OTHER; note = phosphorothioate linkage
tctccatgaggaccaccagcatg

SEQ ID NO: 516 - RNA, 23 nt, synthetic construct
  source 1..23: mol_type = other RNA
  misc_feature 1..23: note = Antisense: ETXS940; corresponding to SEQ ID NO: 136
  modified_base 1: mod_base = cm
  modified_base 2: mod_base = OTHER; note = 2'Fluoro-adenosine
  modified_base 3: mod_base = OTHER; note = 2'O-methyl-adenosine
  modified_base 4: mod_base = OTHER; note = 2'Fluoro-adenosine
  modified_base 5: mod_base = OTHER; note = 2'O-methyl-adenosine
  modified_base 6: mod_base = OTHER; note = 2' Fluoro-uridine
  modified_base 7: mod_base = cm
  modified_base 8: mod_base = OTHER; note = 2' Fluoro-cytidine
  modified_base 9: mod_base = OTHER; note = 2' Fluoro-uridine
  modified_base 10: mod_base = um
  modified_base 11: mod_base = gm
  modified_base 12: mod_base = um
  modified_base 13: mod_base = gm
  modified_base 14: mod_base = OTHER; note = 2' Fluoro-guanosine
  modified_base 15: mod_base = OTHER; note = 2'O-methyl-adenosine
  modified_base 16: mod_base = OTHER; note = 2' Fluoro-uridine
  modified_base 17: mod_base = gm
  modified_base 18: mod_base = OTHER; note = 2'O-methyl-adenosine
  modified_base 19: mod_base = OTHER; note = 2'O-methyl-adenosine
  modified_base 20: mod_base = gm
  modified_base 21: mod_base = gm
  modified_base 22: mod_base = cm
  modified_base 23: mod_base = OTHER; note = 2'O-methyl-adenosine
  modified_base 1^2: mod_base = OTHER; note = phosphorothioate linkage
  modified_base 2^3: mod_base = OTHER; note = phosphorothioate linkage
  modified_base 21^22: mod_base = OTHER; note = phosphorothioate linkage
  modified_base 22^23: mod_base = OTHER; note = phosphorothioate linkage
caaaatccttgtggatgaaggca

SEQ ID NO: 517 - RNA, 23 nt, synthetic construct
  source 1..23: mol_type = other RNA
  misc_feature 1..23: note = Antisense: ETXS942; corresponding to SEQ ID NO: 137
  modified_base 1: mod_base = cm
  modified_base 2: mod_base = OTHER; note = 2' Fluoro-guanosine
  modified_base 3: mod_base = um
  modified_base 4: mod_base = OTHER; note = 2' Fluoro-guanosine
  modified_base 5: mod_base = cm
  modified_base 6: mod_base = OTHER; note = 2' Fluoro-cytidine
  modified_base 7: mod_base = um
  modified_base 8: mod_base = OTHER; note = 2' Fluoro-cytidine
  modified_base 9: mod_base = OTHER; note = 2'Fluoro-adenosine
  modified_base 10: mod_base = um
  modified_base 11: mod_base = gm
  modified_base 12: mod_base = gm
  modified_base 13: mod_base = OTHER; note = 2'O-methyl-adenosine
  modified_base 14: mod_base = OTHER; note = 2' Fluoro-guanosine
  modified_base 15: mod_base = OTHER; note = 2'O-methyl-adenosine
  modified_base 16: mod_base = OTHER; note = 2' Fluoro-uridine
  modified_base 17: mod_base = cm
  modified_base 18: mod_base = um
  modified_base 19: mod_base = um
  modified_base 20: mod_base = um
  modified_base 21: mod_base = cm
  modified_base 22: mod_base = gm
  modified_base 23: mod_base = cm
  modified_base 1^2: mod_base = OTHER; note = phosphorothioate linkage
  modified_base 2^3: mod_base = OTHER; note = phosphorothioate linkage
  modified_base 21^22: mod_base = OTHER; note = phosphorothioate linkage
  modified_base 22^23: mod_base = OTHER; note = phosphorothioate linkage
cgtgcctcatggagatctttcgc

SEQ ID NO: 518 - RNA, 23 nt, synthetic construct
  source 1..23: mol_type = other RNA
  misc_feature 1..23: note = Antisense: ETXS944; corresponding to SEQ ID NO: 138
  modified_base 1: mod_base = OTHER; note = 2'O-methyl-adenosine
  modified_base 2: mod_base = OTHER; note = 2' Fluoro-uridine
  modified_base 3: mod_base = cm
  modified_base 4: mod_base = OTHER; note = 2'Fluoro-adenosine
  modified_base 5: mod_base = OTHER; note = 2'O-methyl-adenosine
  modified_base 6: mod_base = OTHER; note = 2'Fluoro-adenosine
  modified_base 7: mod_base = OTHER; note = 2'O-methyl-adenosine
  modified_base 8: mod_base = OTHER; note = 2' Fluoro-uridine
  modified_base 9: mod_base = OTHER; note = 2' Fluoro-cytidine
  modified_base 10: mod_base = cm
  modified_base 11: mod_base = um
  modified_base 12: mod_base = um
  modified_base 13: mod_base = gm
  modified_base 14: mod_base = OTHER; note = 2' Fluoro-uridine
  modified_base 15: mod_base = gm
  modified_base 16: mod_base = OTHER; note = 2' Fluoro-guanosine
  modified_base 17: mod_base = OTHER; note = 2'O-methyl-adenosine
  modified_base 18: mod_base = um
  modified_base 19: mod_base = gm
  modified_base 20: mod_base = OTHER; note = 2'O-methyl-adenosine
  modified_base 21: mod_base = OTHER; note = 2'O-methyl-adenosine
  modified_base 22: mod_base = gm
  modified_base 23: mod_base = gm
  modified_base 1^2: mod_base = OTHER; note = phosphorothioate linkage
  modified_base 2^3: mod_base = OTHER; note = phosphorothioate linkage
  modified_base 21^22: mod_base = OTHER; note = phosphorothioate linkage
  modified_base 22^23: mod_base = OTHER; note = phosphorothioate linkage
atcaaaatccttgtggatgaagg

SEQ ID NO: 519 - RNA, 23 nt, synthetic construct
  source 1..23: mol_type = other RNA
  misc_feature 1..23: note = Antisense: ETXS946; corresponding to SEQ ID NO: 139
  modified_base 1: mod_base = um
  modified_base 2: mod_base = OTHER; note = 2' Fluoro-uridine
  modified_base 3: mod_base = cm
  modified_base 4: mod_base = OTHER; note = 2'Fluoro-adenosine
  modified_base 5: mod_base = gm
  modified_base 6: mod_base = OTHER; note = 2' Fluoro-guanosine
  modified_base 7: mod_base = OTHER; note = 2'O-methyl-adenosine
  modified_base 8: mod_base = OTHER; note = 2' Fluoro-uridine
  modified_base 9: mod_base = OTHER; note = 2' Fluoro-uridine
  modified_base 10: mod_base = OTHER; note = 2'O-methyl-adenosine
  modified_base 11: mod_base = OTHER; note = 2'O-methyl-adenosine
  modified_base 12: mod_base = um
  modified_base 13: mod_base = cm
  modified_base 14: mod_base = OTHER; note = 2' Fluoro-uridine
  modified_base 15: mod_base = cm
  modified_base 16: mod_base = OTHER; note = 2'Fluoro-adenosine
  modified_base 17: mod_base = um
  modified_base 18: mod_base = cm
  modified_base 19: mod_base = OTHER; note = 2'O-methyl-adenosine
  modified_base 20: mod_base = OTHER; note = 2'O-methyl-adenosine
  modified_base 21: mod_base = OTHER; note = 2'O-methyl-adenosine
  modified_base 22: mod_base = cm
  modified_base 23: mod_base = OTHER; note = 2'O-methyl-adenosine
  modified_base 1^2: mod_base = OTHER; note = phosphorothioate linkage
  modified_base 2^3: mod_base = OTHER; note = phosphorothioate linkage
  modified_base 21^22: mod_base = OTHER; note = phosphorothioate linkage
  modified_base 22^23: mod_base = OTHER; note = phosphorothioate linkage
ttcaggattaatctcatcaaaca

SEQ ID NO: 520 - RNA, 23 nt, synthetic construct
  source 1..23: mol_type = other RNA
  misc_feature 1..23: note = Antisense: ETXS948; corresponding to SEQ ID NO: 140
  modified_base 1: mod_base = OTHER; note = 2'O-methyl-adenosine
  modified_base 2: mod_base = OTHER; note = 2'Fluoro-adenosine
  modified_base 3: mod_base = um
  modified_base 4: mod_base = OTHER; note = 2' Fluoro-cytidine
  modified_base 5: mod_base = cm
  modified_base 6: mod_base = OTHER; note = 2' Fluoro-uridine
  modified_base 7: mod_base = um
  modified_base 8: mod_base = OTHER; note = 2' Fluoro-guanosine
  modified_base 9: mod_base = OTHER; note = 2' Fluoro-uridine
  modified_base 10: mod_base = gm
  modified_base 11: mod_base = gm
  modified_base 12: mod_base = OTHER; note = 2'O-methyl-adenosine
  modified_base 13: mod_base = um
  modified_base 14: mod_base = OTHER; note = 2' Fluoro-guanosine
  modified_base 15: mod_base = OTHER; note = 2'O-methyl-adenosine
  modified_base 16: mod_base = OTHER; note = 2'Fluoro-adenosine
  modified_base 17: mod_base = gm
  modified_base 18: mod_base = gm
  modified_base 19: mod_base = cm
  modified_base 20: mod_base = OTHER; note = 2'O-methyl-adenosine
  modified_base 21: mod_base = OTHER; note = 2'O-methyl-adenosine
  modified_base 22: mod_base = OTHER; note = 2'O-methyl-adenosine
  modified_base 23: mod_base = OTHER; note = 2'O-methyl-adenosine
  modified_base 1^2: mod_base = OTHER; note = phosphorothioate linkage
  modified_base 2^3: mod_base = OTHER; note = phosphorothioate linkage
  modified_base 21^22: mod_base = OTHER; note = phosphorothioate linkage
  modified_base 22^23: mod_base = OTHER; note = phosphorothioate linkage
aatccttgtggatgaaggcaaaa

SEQ ID NO: 521 - RNA, 23 nt, synthetic construct
  source 1..23: mol_type = other RNA
  misc_feature 1..23: note = Antisense: ETXS950; corresponding to SEQ ID NO: 141
  modified_base 1: mod_base = cm
  modified_base 2: mod_base = OTHER; note = 2' Fluoro-cytidine
  modified_base 3: mod_base = OTHER; note = 2'O-methyl-adenosine
  modified_base 4: mod_base = OTHER; note = 2' Fluoro-uridine
  modified_base 5: mod_base = cm
  modified_base 6: mod_base = OTHER; note = 2' Fluoro-guanosine
  modified_base 7: mod_base = um
  modified_base 8: mod_base = OTHER; note = 2' Fluoro-guanosine
  modified_base 9: mod_base = OTHER; note = 2' Fluoro-cytidine
  modified_base 10: mod_base = cm
  modified_base 11: mod_base = um
  modified_base 12: mod_base = cm
  modified_base 13: mod_base = OTHER; note = 2'O-methyl-adenosine
  modified_base 14: mod_base = OTHER; note = 2' Fluoro-uridine
  modified_base 15: mod_base = gm
  modified_base 16: mod_base = OTHER; note = 2' Fluoro-guanosine
  modified_base 17: mod_base = OTHER; note = 2'O-methyl-adenosine
  modified_base 18: mod_base = gm
  modified_base 19: mod_base = OTHER; note = 2'O-methyl-adenosine
  modified_base 20: mod_base = um
  modified_base 21: mod_base = cm
  modified_base 22: mod_base = um
  modified_base 23: mod_base = um
  modified_base 1^2: mod_base = OTHER; note = phosphorothioate linkage
  modified_base 2^3: mod_base = OTHER; note = phosphorothioate linkage
  modified_base 21^22: mod_base = OTHER; note = phosphorothioate linkage
  modified_base 22^23: mod_base = OTHER; note = phosphorothioate linkage
ccatcgtgcctcatggagatctt

SEQ ID NO: 522 - RNA, 23 nt, synthetic construct
  source 1..23: mol_type = other RNA
  misc_feature 1..23: note = Antisense: ETXS952; corresponding to SEQ ID NO: 122
  modified_base 1: mod_base = OTHER; note = 2'O-methyl-adenosine
  modified_base 2: mod_base = OTHER; note = 2'Fluoro-adenosine
  modified_base 3: mod_base = OTHER; note = 2'O-methyl-adenosine
  modified_base 4: mod_base = OTHER; note = 2' Fluoro-uridine
  modified_base 5: mod_base = cm
  modified_base 6: mod_base = OTHER; note = 2' Fluoro-cytidine
  modified_base 7: mod_base = um
  modified_base 8: mod_base = OTHER; note = 2' Fluoro-uridine
  modified_base 9: mod_base = OTHER; note = 2' Fluoro-guanosine
  modified_base 10: mod_base = um
  modified_base 11: mod_base = gm
  modified_base 12: mod_base = gm
  modified_base 13: mod_base = OTHER; note = 2'O-methyl-adenosine
  modified_base 14: mod_base = OTHER; note = 2' Fluoro-uridine
  modified_base 15: mod_base = gm
  modified_base 16: mod_base = OTHER; note = 2'Fluoro-adenosine
  modified_base 17: mod_base = OTHER; note = 2'O-methyl-adenosine
  modified_base 18: mod_base = gm
  modified_base 19: mod_base = gm
  modified_base 20: mod_base = cm
  modified_base 21: mod_base = OTHER; note = 2'O-methyl-adenosine
  modified_base 22: mod_base = OTHER; note = 2'O-methyl-adenosine
  modified_base 23: mod_base = OTHER; note = 2'O-methyl-adenosine
  modified_base 1^2: mod_base = OTHER; note = phosphorothioate linkage
  modified_base 2^3: mod_base = OTHER; note = phosphorothioate linkage
  modified_base 21^22: mod_base = OTHER; note = phosphorothioate linkage
  modified_base 22^23: mod_base = OTHER; note = phosphorothioate linkage
aaatccttgtggatgaaggcaaa

SEQ ID NO: 523 - RNA, 23 nt, synthetic construct
  source 1..23: mol_type = other RNA
  misc_feature 1..23: note = Antisense: ETXS954; corresponding to SEQ ID NO: 123
  modified_base 1: mod_base = gm
  modified_base 2: mod_base = OTHER; note = 2' Fluoro-cytidine
  modified_base 3: mod_base = cm
  modified_base 4: mod_base = OTHER; note = 2' Fluoro-uridine
  modified_base 5: mod_base = cm
  modified_base 6: mod_base = OTHER; note = 2'Fluoro-adenosine
  modified_base 7: mod_base = um
  modified_base 8: mod_base = OTHER; note = 2' Fluoro-guanosine
  modified_base 9: mod_base = OTHER; note = 2' Fluoro-guanosine
  modified_base 10: mod_base = OTHER; note = 2'O-methyl-adenosine
  modified_base 11: mod_base = gm
  modified_base 12: mod_base = OTHER; note = 2'O-methyl-adenosine
  modified_base 13: mod_base = um
  modified_base 14: mod_base = OTHER; note = 2' Fluoro-cytidine
  modified_base 15: mod_base = um
  modified_base 16: mod_base = OTHER; note = 2' Fluoro-uridine
  modified_base 17: mod_base = um
  modified_base 18: mod_base = cm
  modified_base 19: mod_base = gm
  modified_base 20: mod_base = cm
  modified_base 21: mod_base = OTHER; note = 2'O-methyl-adenosine
  modified_base 22: mod_base = gm
  modified_base 23: mod_base = cm
  modified_base 1^2: mod_base = OTHER; note = phosphorothioate linkage
  modified_base 2^3: mod_base = OTHER; note = phosphorothioate linkage
  modified_base 21^22: mod_base = OTHER; note = phosphorothioate linkage
  modified_base 22^23: mod_base = OTHER; note = phosphorothioate linkage
gcctcatggagatctttcgcagc

SEQ ID NO: 524 - RNA, 23 nt, synthetic construct
  source 1..23: mol_type = other RNA
  misc_feature 1..23: note = Antisense: ETXS956; corresponding to SEQ ID NO: 124
  modified_base 1: mod_base = um
  modified_base 2: mod_base = OTHER; note = 2' Fluoro-uridine
  modified_base 3: mod_base = cm
  modified_base 4: mod_base = OTHER; note = 2' Fluoro-uridine
  modified_base 5: mod_base = cm
  modified_base 6: mod_base = OTHER; note = 2' Fluoro-cytidine
  modified_base 7: mod_base = OTHER; note = 2'O-methyl-adenosine
  modified_base 8: mod_base = OTHER; note = 2' Fluoro-uridine
  modified_base 9: mod_base = OTHER; note = 2' Fluoro-guanosine
  modified_base 10: mod_base = OTHER; note = 2'O-methyl-adenosine
  modified_base 11: mod_base = gm
  modified_base 12: mod_base = gm
  modified_base 13: mod_base = OTHER; note = 2'O-methyl-adenosine
  modified_base 14: mod_base = OTHER; note = 2' Fluoro-cytidine
  modified_base 15: mod_base = cm
  modified_base 16: mod_base = OTHER; note = 2'Fluoro-adenosine
  modified_base 17: mod_base = cm
  modified_base 18: mod_base = cm
  modified_base 19: mod_base = OTHER; note = 2'O-methyl-adenosine
  modified_base 20: mod_base = gm
  modified_base 21: mod_base = cm
  modified_base 22: mod_base = OTHER; note = 2'O-methyl-adenosine
  modified_base 23: mod_base = um
  modified_base 1^2: mod_base = OTHER; note = phosphorothioate linkage
  modified_base 2^3: mod_base = OTHER; note = phosphorothioate linkage
  modified_base 21^22: mod_base = OTHER; note = phosphorothioate linkage
  modified_base 22^23: mod_base = OTHER; note = phosphorothioate linkage
ttctccatgaggaccaccagcat

SEQ ID NO: 525 - RNA, 23 nt, synthetic construct
  source 1..23: mol_type = other RNA
  misc_feature 1..23: note = Antisense: ETXS958; corresponding to SEQ ID NO: 125
  modified_base 1: mod_base = um
  modified_base 2: mod_base = OTHER; note = 2' Fluoro-guanosine
  modified_base 3: mod_base = cm
  modified_base 4: mod_base = OTHER; note = 2' Fluoro-cytidine
  modified_base 5: mod_base = um
  modified_base 6: mod_base = OTHER; note = 2' Fluoro-cytidine
  modified_base 7: mod_base = OTHER; note = 2'O-methyl-adenosine
  modified_base 8: mod_base = OTHER; note = 2' Fluoro-uridine
  modified_base 9: mod_base = OTHER; note = 2' Fluoro-guanosine
  modified_base 10: mod_base = gm
  modified_base 11: mod_base = OTHER; note = 2'O-methyl-adenosine
  modified_base 12: mod_base = gm
  modified_base 13: mod_base = OTHER; note = 2'O-methyl-adenosine
  modified_base 14: mod_base = OTHER; note = 2' Fluoro-uridine
  modified_base 15: mod_base = cm
  modified_base 16: mod_base = OTHER; note = 2' Fluoro-uridine
  modified_base 17: mod_base = um
  modified_base 18: mod_base = um
  modified_base 19: mod_base = cm
  modified_base 20: mod_base = gm
  modified_base 21: mod_base = cm
  modified_base 22: mod_base = OTHER; note = 2'O-methyl-adenosine
  modified_base 23: mod_base = gm
  modified_base 1^2: mod_base = OTHER; note = phosphorothioate linkage
  modified_base 2^3: mod_base = OTHER; note = phosphorothioate linkage
  modified_base 21^22: mod_base = OTHER; note = phosphorothioate linkage
  modified_base 22^23: mod_base = OTHER; note = phosphorothioate linkage
tgcctcatggagatctttcgcag

SEQ ID NO: 526 - RNA, 23 nt, synthetic construct
  source 1..23: mol_type = other RNA
  misc_feature 1..23: note = Antisense: ETXS960; corresponding to SEQ ID NO: 126
  modified_base 1: mod_base = OTHER; note = 2'O-methyl-adenosine
  modified_base 2: mod_base = OTHER; note = 2' Fluoro-guanosine
  modified_base 3: mod_base = cm
  modified_base 4: mod_base = OTHER; note = 2'Fluoro-adenosine
  modified_base 5: mod_base = gm
  modified_base 6: mod_base = OTHER; note = 2' Fluoro-cytidine
  modified_base 7: mod_base = um
  modified_base 8: mod_base = OTHER; note = 2' Fluoro-cytidine
  modified_base 9: mod_base = OTHER; note = 2'Fluoro-adenosine
  modified_base 10: mod_base = um
  modified_base 11: mod_base = gm
  modified_base 12: mod_base = cm
  modified_base 13: mod_base = OTHER; note = 2'O-methyl-adenosine
  modified_base 14: mod_base = OTHER; note = 2' Fluoro-uridine
  modified_base 15: mod_base = cm
  modified_base 16: mod_base = OTHER; note = 2' Fluoro-uridine
  modified_base 17: mod_base = cm
  modified_base 18: mod_base = OTHER; note = 2'O-methyl-adenosine
  modified_base 19: mod_base = um
  modified_base 20: mod_base = OTHER; note = 2'O-methyl-adenosine
  modified_base 21: mod_base = cm
  modified_base 22: mod_base = um
  modified_base 23: mod_base = um
  modified_base 1^2: mod_base = OTHER; note = phosphorothioate linkage
  modified_base 2^3: mod_base = OTHER; note = phosphorothioate linkage
  modified_base 21^22: mod_base = OTHER; note = phosphorothioate linkage
  modified_base 22^23: mod_base = OTHER; note = phosphorothioate linkage
agcagctcatgcatctcatactt

SEQ ID NO: 527 - RNA, 23 nt, synthetic construct
  source 1..23: mol_type = other RNA
  misc_feature 1..23: note = Antisense: ETXS962; corresponding to SEQ ID NO: 127
  modified_base 1: mod_base = um
  modified_base 2: mod_base = OTHER; note = 2' Fluoro-cytidine
  modified_base 3: mod_base = OTHER; note = 2'O-methyl-adenosine
  modified_base 4: mod_base = OTHER; note = 2' Fluoro-guanosine
  modified_base 5: mod_base = gm
  modified_base 6: mod_base = OTHER; note = 2'Fluoro-adenosine
  modified_base 7: mod_base = um
  modified_base 8: mod_base = OTHER; note = 2' Fluoro-uridine
  modified_base 9: mod_base = OTHER; note = 2'Fluoro-adenosine
  modified_base 10: mod_base = OTHER; note = 2'O-methyl-adenosine
  modified_base 11: mod_base = um
  modified_base 12: mod_base = cm
  modified_base 13: mod_base = um
  modified_base 14: mod_base = OTHER; note = 2' Fluoro-cytidine
  modified_base 15: mod_base = OTHER; note = 2'O-methyl-adenosine
  modified_base 16: mod_base = OTHER; note = 2' Fluoro-uridine
  modified_base 17: mod_base = cm
  modified_base 18: mod_base = OTHER; note = 2'O-methyl-adenosine
  modified_base 19: mod_base = OTHER; note = 2'O-methyl-adenosine
  modified_base 20: mod_base = OTHER; note = 2'O-methyl-adenosine
  modified_base 21: mod_base = cm
  modified_base 22: mod_base = OTHER; note = 2'O-methyl-adenosine
  modified_base 23: mod_base = gm
  modified_base 1^2: mod_base = OTHER; note = phosphorothioate linkage
  modified_base 2^3: mod_base = OTHER; note = phosphorothioate linkage
  modified_base 21^22: mod_base = OTHER; note = phosphorothioate linkage
  modified_base 22^23: mod_base = OTHER; note = phosphorothioate linkage
tcaggattaatctcatcaaacag

SEQ ID NO: 528 - RNA, 23 nt, synthetic construct
  source 1..23: mol_type = other RNA
  misc_feature 1..23: note = Antisense: ETXS964; corresponding to SEQ ID NO: 128
  modified_base 1: mod_base = um
  modified_base 2: mod_base = OTHER; note = 2' Fluoro-uridine
  modified_base 3: mod_base = gm
  modified_base 4: mod_base = OTHER; note = 2' Fluoro-guanosine
  modified_base 5: mod_base = um
  modified_base 6: mod_base = OTHER; note = 2' Fluoro-uridine
  modified_base 7: mod_base = um
  modified_base 8: mod_base = OTHER; note = 2' Fluoro-cytidine
  modified_base 9: mod_base = OTHER; note = 2'Fluoro-adenosine
  modified_base 10: mod_base = gm
  modified_base 11: mod_base = gm
  modified_base 12: mod_base = OTHER; note = 2'O-methyl-adenosine
  modified_base 13: mod_base = um
  modified_base 14: mod_base = OTHER; note = 2' Fluoro-uridine
  modified_base 15: mod_base = OTHER; note = 2'O-methyl-adenosine
  modified_base 16: mod_base = OTHER; note = 2'Fluoro-adenosine
  modified_base 17: mod_base = um
  modified_base 18: mod_base = cm
  modified_base 19: mod_base = um
  modified_base 20: mod_base = cm
  modified_base 21: mod_base = OTHER; note = 2'O-methyl-adenosine
  modified_base 22: mod_base = um
  modified_base 23: mod_base = cm
  modified_base 1^2: mod_base = OTHER; note = phosphorothioate linkage
  modified_base 2^3: mod_base = OTHER; note = phosphorothioate linkage
  modified_base 21^22: mod_base = OTHER; note = phosphorothioate linkage
  modified_base 22^23: mod_base = OTHER; note = phosphorothioate linkage
ttggtttcaggattaatctcatc

SEQ ID NO: 529 - RNA, 23 nt, synthetic construct
  source 1..23: mol_type = other RNA
  misc_feature 1..23: note = Antisense: ETXS966; corresponding to SEQ ID NO: 129
  modified_base 1: mod_base = gm
  modified_base 2: mod_base = OTHER; note = 2' Fluoro-uridine
  modified_base 3: mod_base = um
  modified_base 4: mod_base = OTHER; note = 2' Fluoro-uridine
  modified_base 5: mod_base = cm
  modified_base 6: mod_base = OTHER; note = 2'Fluoro-adenosine
  modified_base 7: mod_base = gm
  modified_base 8: mod_base = OTHER; note = 2' Fluoro-guanosine
  modified_base 9: mod_base = OTHER; note = 2'Fluoro-adenosine
  modified_base 10: mod_base = um
  modified_base 11: mod_base = um
  modified_base 12: mod_base = OTHER; note = 2'O-methyl-adenosine
  modified_base 13: mod_base = OTHER; note = 2'O-methyl-adenosine
  modified_base 14: mod_base = OTHER; note = 2' Fluoro-uridine
  modified_base 15: mod_base = cm
  modified_base 16: mod_base = OTHER; note = 2' Fluoro-uridine
  modified_base 17: mod_base = cm
  modified_base 18: mod_base = OTHER; note = 2'O-methyl-adenosine
  modified_base 19: mod_base = um
  modified_base 20: mod_base = cm
  modified_base 21: mod_base = OTHER; note = 2'O-methyl-adenosine
  modified_base 22: mod_base = OTHER; note = 2'O-methyl-adenosine
  modified_base 23: mod_base = OTHER; note = 2'O-methyl-adenosine
  modified_base 1^2: mod_base = OTHER; note = phosphorothioate linkage
  modified_base 2^3: mod_base = OTHER; note = phosphorothioate linkage
  modified_base 21^22: mod_base = OTHER; note = phosphorothioate linkage
  modified_base 22^23: mod_base = OTHER; note = phosphorothioate linkage
gtttcaggattaatctcatcaaa

SEQ ID NO: 530 - RNA, 23 nt, synthetic construct
  source 1..23: mol_type = other RNA
  misc_feature 1..23: note = Antisense: ETXS968; corresponding to SEQ ID NO: 130
  modified_base 1: mod_base = um
  modified_base 2: mod_base = OTHER; note = 2' Fluoro-guanosine
  modified_base 3: mod_base = gm
  modified_base 4: mod_base = OTHER; note = 2' Fluoro-uridine
  modified_base 5: mod_base = um
  modified_base 6: mod_base = OTHER; note = 2' Fluoro-uridine
  modified_base 7: mod_base = cm
  modified_base 8: mod_base = OTHER; note = 2'Fluoro-adenosine
  modified_base 9: mod_base = OTHER; note = 2' Fluoro-guanosine
  modified_base 10: mod_base = gm
  modified_base 11: mod_base = OTHER; note = 2'O-methyl-adenosine
  modified_base 12: mod_base = um
  modified_base 13: mod_base = um
  modified_base 14: mod_base = OTHER; note = 2'Fluoro-adenosine
  modified_base 15: mod_base = OTHER; note = 2'O-methyl-adenosine
  modified_base 16: mod_base = OTHER; note = 2' Fluoro-uridine
  modified_base 17: mod_base = cm
  modified_base 18: mod_base = um
  modified_base 19: mod_base = cm
  modified_base 20: mod_base = OTHER; note = 2'O-methyl-adenosine
  modified_base 21: mod_base = um
  modified_base 22: mod_base = cm
  modified_base 23: mod_base = OTHER; note = 2'O-methyl-adenosine
  modified_base 1^2: mod_base = OTHER; note = phosphorothioate linkage
  modified_base 2^3: mod_base = OTHER; note = phosphorothioate linkage
  modified_base 21^22: mod_base = OTHER; note = phosphorothioate linkage
  modified_base 22^23: mod_base = OTHER; note = phosphorothioate linkage
tggtttcaggattaatctcatca

SEQ ID NO: 531 - RNA, 23 nt, synthetic construct
  source 1..23: mol_type = other RNA
  misc_feature 1..23: note = Antisense: ETXS970; corresponding to SEQ ID NO: 131
  modified_base 1: mod_base = gm
  modified_base 2: mod_base = OTHER; note = 2' Fluoro-guanosine
  modified_base 3: mod_base = um
  modified_base 4: mod_base = OTHER; note = 2' Fluoro-uridine
  modified_base 5: mod_base = um
  modified_base 6: mod_base = OTHER; note = 2' Fluoro-cytidine
  modified_base 7: mod_base = OTHER; note = 2'O-methyl-adenosine
  modified_base 8: mod_base = OTHER; note = 2' Fluoro-guanosine
  modified_base 9: mod_base = OTHER; note = 2' Fluoro-guanosine
  modified_base 10: mod_base = OTHER; note = 2'O-methyl-adenosine
  modified_base 11: mod_base = um
  modified_base 12: mod_base = um
  modified_base 13: mod_base = OTHER; note = 2'O-methyl-adenosine
  modified_base 14: mod_base = OTHER; note = 2'Fluoro-adenosine
  modified_base 15: mod_base = um
  modified_base 16: mod_base = OTHER; note = 2' Fluoro-cytidine
  modified_base 17: mod_base = um
  modified_base 18: mod_base = cm
  modified_base 19: mod_base = OTHER; note = 2'O-methyl-adenosine
  modified_base 20: mod_base = um
  modified_base 21: mod_base = cm
  modified_base 22: mod_base = OTHER; note = 2'O-methyl-adenosine
  modified_base 23: mod_base = OTHER; note = 2'O-methyl-adenosine
  modified_base 1^2: mod_base = OTHER; note = phosphorothioate linkage
  modified_base 2^3: mod_base = OTHER; note = phosphorothioate linkage
  modified_base 21^22: mod_base = OTHER; note = phosphorothioate linkage
  modified_base 22^23: mod_base = OTHER; note = phosphorothioate linkage
ggtttcaggattaatctcatcaa

SEQ ID NO: 532 - RNA, 23 nt, synthetic construct
  source 1..23: mol_type = other RNA
  misc_feature 1..23: note = Antisense: ETXS972; corresponding to SEQ ID NO: 132
  modified_base 1: mod_base = OTHER; note = 2'O-methyl-adenosine
  modified_base 2: mod_base = OTHER; note = 2' Fluoro-guanosine
  modified_base 3: mod_base = gm
  modified_base 4: mod_base = OTHER; note = 2'Fluoro-adenosine
  modified_base 5: mod_base = um
  modified_base 6: mod_base = OTHER; note = 2' Fluoro-uridine
  modified_base 7: mod_base = OTHER; note = 2'O-methyl-adenosine
  modified_base 8: mod_base = OTHER; note = 2'Fluoro-adenosine
  modified_base 9: mod_base = OTHER; note = 2' Fluoro-uridine
  modified_base 10: mod_base = cm
  modified_base 11: mod_base = um
  modified_base 12: mod_base = cm
  modified_base 13: mod_base = OTHER; note = 2'O-methyl-adenosine
  modified_base 14: mod_base = OTHER; note = 2' Fluoro-uridine
  modified_base 15: mod_base = cm
  modified_base 16: mod_base = OTHER; note = 2'Fluoro-adenosine
  modified_base 17: mod_base = OTHER; note = 2'O-methyl-adenosine
  modified_base 18: mod_base = OTHER; note = 2'O-methyl-adenosine
  modified_base 19: mod_base = cm
  modified_base 20: mod_base = OTHER; note = 2'O-methyl-adenosine
  modified_base 21: mod_base = gm
  modified_base 22: mod_base = um
  modified_base 23: mod_base = um
  modified_base 1^2: mod_base = OTHER; note = phosphorothioate linkage
  modified_base 2^3: mod_base = OTHER; note = phosphorothioate linkage
  modified_base 21^22: mod_base = OTHER; note = phosphorothioate linkage
  modified_base 22^23: mod_base = OTHER; note = phosphorothioate linkage
aggattaatctcatcaaacagtt

SEQ ID NO: 533 - RNA, 23 nt, synthetic construct
  source 1..23: mol_type = other RNA
  misc_feature 1..23: note = Antisense: ETXS974; corresponding to SEQ ID NO: 133
  modified_base 1: mod_base = um
  modified_base 2: mod_base = OTHER; note = 2' Fluoro-cytidine
  modified_base 3: mod_base = cm
  modified_base 4: mod_base = OTHER; note = 2' Fluoro-uridine
  modified_base 5: mod_base = um
  modified_base 6: mod_base = OTHER; note = 2' Fluoro-guanosine
  modified_base 7: mod_base = um
  modified_base 8: mod_base = OTHER; note = 2' Fluoro-guanosine
  modified_base 9: mod_base = OTHER; note = 2' Fluoro-guanosine
  modified_base 10: mod_base = OTHER; note = 2'O-methyl-adenosine
  modified_base 11: mod_base = um
  modified_base 12: mod_base = gm
  modified_base 13: mod_base = OTHER; note = 2'O-methyl-adenosine
  modified_base 14: mod_base = OTHER; note = 2'Fluoro-adenosine
  modified_base 15: mod_base = gm
  modified_base 16: mod_base = OTHER; note = 2' Fluoro-guanosine
  modified_base 17: mod_base = cm
  modified_base 18: mod_base = OTHER; note = 2'O-methyl-adenosine
  modified_base 19: mod_base = OTHER; note = 2'O-methyl-adenosine
  modified_base 20: mod_base = OTHER; note = 2'O-methyl-adenosine
  modified_base 21: mod_base = OTHER; note = 2'O-methyl-adenosine
  modified_base 22: mod_base = cm
  modified_base 23: mod_base = um
  modified_base 1^2: mod_base = OTHER; note = phosphorothioate linkage
  modified_base 2^3: mod_base = OTHER; note = phosphorothioate linkage
  modified_base 21^22: mod_base = OTHER; note = phosphorothioate linkage
  modified_base 22^23: mod_base = OTHER; note = phosphorothioate linkage
tccttgtggatgaaggcaaaact

SEQ ID NO: 534 - RNA, 23 nt, synthetic construct
  source 1..23: mol_type = other RNA
  misc_feature 1..23: note = Antisense: ETXS976; corresponding to SEQ ID NO: 134
  modified_base 1: mod_base = gm
  modified_base 2: mod_base = OTHER; note = 2' Fluoro-uridine
  modified_base 3: mod_base = gm
  modified_base 4: mod_base = OTHER; note = 2' Fluoro-cytidine
  modified_base 5: mod_base = cm
  modified_base 6: mod_base = OTHER; note = 2' Fluoro-uridine
  modified_base 7: mod_base = cm
  modified_base 8: mod_base = OTHER; note = 2'Fluoro-adenosine
  modified_base 9: mod_base = OTHER; note = 2' Fluoro-uridine
  modified_base 10: mod_base = gm
  modified_base 11: mod_base = gm
  modified_base 12: mod_base = OTHER; note = 2'O-methyl-adenosine
  modified_base 13: mod_base = gm
  modified_base 14: mod_base = OTHER; note = 2'Fluoro-adenosine
  modified_base 15: mod_base = um
  modified_base 16: mod_base = OTHER; note = 2' Fluoro-cytidine
  modified_base 17: mod_base = um
  modified_base 18: mod_base = um
  modified_base 19: mod_base = um
  modified_base 20: mod_base = cm
  modified_base 21: mod_base = gm
  modified_base 22: mod_base = cm
  modified_base 23: mod_base = OTHER; note = 2'O-methyl-adenosine
  modified_base 1^2: mod_base = OTHER; note = phosphorothioate linkage
  modified_base 2^3: mod_base = OTHER; note = phosphorothioate linkage
  modified_base 21^22: mod_base = OTHER; note = phosphorothioate linkage
  modified_base 22^23: mod_base = OTHER; note = phosphorothioate linkage
gtgcctcatggagatctttcgca

SEQ ID NO: 535 - RNA, 23 nt, synthetic construct
  source 1..23: mol_type = other RNA
  misc_feature 1..23: note = Antisense: ETXS978; corresponding to SEQ ID NO: 135
  modified_base 1: mod_base = um
  modified_base 2: mod_base = OTHER; note = 2' Fluoro-cytidine
  modified_base 3: mod_base = um
  modified_base 4: mod_base = OTHER; note = 2' Fluoro-cytidine
  modified_base 5: mod_base = cm
  modified_base 6: mod_base = OTHER; note = 2'Fluoro-adenosine
  modified_base 7: mod_base = um
  modified_base 8: mod_base = OTHER; note = 2' Fluoro-guanosine
  modified_base 9: mod_base = OTHER; note = 2'Fluoro-adenosine
  modified_base 10: mod_base = gm
  modified_base 11: mod_base = gm
  modified_base 12: mod_base = OTHER; note = 2'O-methyl-adenosine
  modified_base 13: mod_base = cm
  modified_base 14: mod_base = OTHER; note = 2' Fluoro-cytidine
  modified_base 15: mod_base = OTHER; note = 2'O-methyl-adenosine
  modified_base 16: mod_base = OTHER; note = 2' Fluoro-cytidine
  modified_base 17: mod_base = cm
  modified_base 18: mod_base = OTHER; note = 2'O-methyl-adenosine
  modified_base 19: mod_base = gm
  modified_base 20: mod_base = cm
  modified_base 21: mod_base = OTHER; note = 2'O-methyl-adenosine
  modified_base 22: mod_base = um
  modified_base 23: mod_base = gm
  modified_base 1^2: mod_base = OTHER; note = phosphorothioate linkage
  modified_base 2^3: mod_base = OTHER; note = phosphorothioate linkage
  modified_base 21^22: mod_base = OTHER; note = phosphorothioate linkage
  modified_base 22^23: mod_base = OTHER; note = phosphorothioate linkage
tctccatgaggaccaccagcatg

SEQ ID NO: 536 - RNA, 23 nt, synthetic construct
  source 1..23: mol_type = other RNA
  misc_feature 1..23: note = Antisense: ETXS980; corresponding to SEQ ID NO: 136
  modified_base 1: mod_base = cm
  modified_base 2: mod_base = OTHER; note = 2'Fluoro-adenosine
  modified_base 3: mod_base = OTHER; note = 2'O-methyl-adenosine
  modified_base 4: mod_base = OTHER; note = 2'Fluoro-adenosine
  modified_base 5: mod_base = OTHER; note = 2'O-methyl-adenosine
  modified_base 6: mod_base = OTHER; note = 2' Fluoro-uridine
  modified_base 7: mod_base = cm
  modified_base 8: mod_base = OTHER; note = 2' Fluoro-cytidine
  modified_base 9: mod_base = OTHER; note = 2' Fluoro-uridine
  modified_base 10: mod_base = um
  modified_base 11: mod_base = gm
  modified_base 12: mod_base = um
  modified_base 13: mod_base = gm
  modified_base 14: mod_base = OTHER; note = 2' Fluoro-guanosine
  modified_base 15: mod_base = OTHER; note = 2'O-methyl-adenosine
  modified_base 16: mod_base = OTHER; note = 2' Fluoro-uridine
  modified_base 17: mod_base = gm
  modified_base 18: mod_base = OTHER; note = 2'O-methyl-adenosine
  modified_base 19: mod_base = OTHER; note = 2'O-methyl-adenosine
  modified_base 20: mod_base = gm
  modified_base 21: mod_base = gm
  modified_base 22: mod_base = cm
  modified_base 23: mod_base = OTHER; note = 2'O-methyl-adenosine
  modified_base 1^2: mod_base = OTHER; note = phosphorothioate linkage
  modified_base 2^3: mod_base = OTHER; note = phosphorothioate linkage
  modified_base 21^22: mod_base = OTHER; note = phosphorothioate linkage
  modified_base 22^23: mod_base = OTHER; note = phosphorothioate linkage
caaaatccttgtggatgaaggca

SEQ ID NO: 537 - RNA, 23 nt, synthetic construct
  source 1..23: mol_type = other RNA
  misc_feature 1..23: note = Antisense: ETXS982; corresponding to SEQ ID NO: 137
  modified_base 1: mod_base = cm
  modified_base 2: mod_base = OTHER; note = 2' Fluoro-guanosine
  modified_base 3: mod_base = um
  modified_base 4: mod_base = OTHER; note = 2' Fluoro-guanosine
  modified_base 5: mod_base = cm
  modified_base 6: mod_base = OTHER; note = 2' Fluoro-cytidine
  modified_base 7: mod_base = um
  modified_base 8: mod_base = OTHER; note = 2' Fluoro-cytidine
  modified_base 9: mod_base = OTHER; note = 2'Fluoro-adenosine
  modified_base 10: mod_base = um
  modified_base 11: mod_base = gm
  modified_base 12: mod_base = gm
  modified_base 13: mod_base = OTHER; note = 2'O-methyl-adenosine
  modified_base 14: mod_base = OTHER; note = 2' Fluoro-guanosine
  modified_base 15: mod_base = OTHER; note = 2'O-methyl-adenosine
  modified_base 16: mod_base = OTHER; note = 2' Fluoro-uridine
  modified_base 17: mod_base = cm
  modified_base 18: mod_base = um
  modified_base 19: mod_base = um
  modified_base 20: mod_base = um
  modified_base 21: mod_base = cm
  modified_base 22: mod_base = gm
  modified_base 23: mod_base = cm
  modified_base 1^2: mod_base = OTHER; note = phosphorothioate linkage
  modified_base 2^3: mod_base = OTHER; note = phosphorothioate linkage
  modified_base 21^22: mod_base = OTHER; note = phosphorothioate linkage
  modified_base 22^23: mod_base = OTHER; note = phosphorothioate linkage
cgtgcctcatggagatctttcgc

SEQ ID NO: 538 - RNA, 23 nt, synthetic construct
  source 1..23: mol_type = other RNA
  misc_feature 1..23: note = Antisense: ETXS984; corresponding to SEQ ID NO: 138
  modified_base 1: mod_base = OTHER; note = 2'O-methyl-adenosine
  modified_base 2: mod_base = OTHER; note = 2' Fluoro-uridine
  modified_base 3: mod_base = cm
  modified_base 4: mod_base = OTHER; note = 2'Fluoro-adenosine
  modified_base 5: mod_base = OTHER; note = 2'O-methyl-adenosine
  modified_base 6: mod_base = OTHER; note = 2'Fluoro-adenosine
  modified_base 7: mod_base = OTHER; note = 2'O-methyl-adenosine
  modified_base 8: mod_base = OTHER; note = 2' Fluoro-uridine
  modified_base 9: mod_base = OTHER; note = 2' Fluoro-cytidine
  modified_base 10: mod_base = cm
  modified_base 11: mod_base = um
  modified_base 12: mod_base = um
  modified_base 13: mod_base = gm
  modified_base 14: mod_base = OTHER; note = 2' Fluoro-uridine
  modified_base 15: mod_base = gm
  modified_base 16: mod_base = OTHER; note = 2' Fluoro-guanosine
  modified_base 17: mod_base = OTHER; note = 2'O-methyl-adenosine
  modified_base 18: mod_base = um
  modified_base 19: mod_base = gm
  modified_base 20: mod_base = OTHER; note = 2'O-methyl-adenosine
  modified_base 21: mod_base = OTHER; note = 2'O-methyl-adenosine
  modified_base 22: mod_base = gm
  modified_base 23: mod_base = gm
  modified_base 1^2: mod_base = OTHER; note = phosphorothioate linkage
  modified_base 2^3: mod_base = OTHER; note = phosphorothioate linkage
  modified_base 21^22: mod_base = OTHER; note = phosphorothioate linkage
  modified_base 22^23: mod_base = OTHER; note = phosphorothioate linkage
atcaaaatccttgtggatgaagg

SEQ ID NO: 539 - RNA, 23 nt, synthetic construct
  source 1..23: mol_type = other RNA
  misc_feature 1..23: note = Antisense: ETXS986; corresponding to SEQ ID NO: 139
  modified_base 1: mod_base = um
  modified_base 2: mod_base = OTHER; note = 2' Fluoro-uridine
  modified_base 3: mod_base = cm
  modified_base 4: mod_base = OTHER; note = 2'Fluoro-adenosine
  modified_base 5: mod_base = gm
  modified_base 6: mod_base = OTHER; note = 2' Fluoro-guanosine
  modified_base 7: mod_base = OTHER; note = 2'O-methyl-adenosine
  modified_base 8: mod_base = OTHER; note = 2' Fluoro-uridine
  modified_base 9: mod_base = OTHER; note = 2' Fluoro-uridine
  modified_base 10: mod_base = OTHER; note = 2'O-methyl-adenosine
  modified_base 11: mod_base = OTHER; note = 2'O-methyl-adenosine
  modified_base 12: mod_base = um
  modified_base 13: mod_base = cm
  modified_base 14: mod_base = OTHER; note = 2' Fluoro-uridine
  modified_base 15: mod_base = cm
  modified_base 16: mod_base = OTHER; note = 2'Fluoro-adenosine
  modified_base 17: mod_base = um
  modified_base 18: mod_base = cm
  modified_base 19: mod_base = OTHER; note = 2'O-methyl-adenosine
  modified_base 20: mod_base = OTHER; note = 2'O-methyl-adenosine
  modified_base 21: mod_base = OTHER; note = 2'O-methyl-adenosine
  modified_base 22: mod_base = cm
  modified_base 23: mod_base = OTHER; note = 2'O-methyl-adenosine
  modified_base 1^2: mod_base = OTHER; note = phosphorothioate linkage
  modified_base 2^3: mod_base = OTHER; note = phosphorothioate linkage
  modified_base 21^22: mod_base = OTHER; note = phosphorothioate linkage
  modified_base 22^23: mod_base = OTHER; note = phosphorothioate linkage
ttcaggattaatctcatcaaaca

SEQ ID NO: 540 - RNA, 23 nt, synthetic construct
  source 1..23: mol_type = other RNA
  misc_feature 1..23: note = Antisense: ETXS988; corresponding to SEQ ID NO: 140
  modified_base 1: mod_base = OTHER; note = 2'O-methyl-adenosine
  modified_base 2: mod_base = OTHER; note = 2'Fluoro-adenosine
  modified_base 3: mod_base = um
  modified_base 4: mod_base = OTHER; note = 2' Fluoro-cytidine
  modified_base 5: mod_base = cm
  modified_base 6: mod_base = OTHER; note = 2' Fluoro-uridine
  modified_base 7: mod_base = um
  modified_base 8: mod_base = OTHER; note = 2' Fluoro-guanosine
  modified_base 9: mod_base = OTHER; note = 2' Fluoro-uridine
  modified_base 10: mod_base = gm
  modified_base 11: mod_base = gm
  modified_base 12: mod_base = OTHER; note = 2'O-methyl-adenosine
  modified_base 13: mod_base = um
  modified_base 14: mod_base = OTHER; note = 2' Fluoro-guanosine
  modified_base 15: mod_base = OTHER; note = 2'O-methyl-adenosine
  modified_base 16: mod_base = OTHER; note = 2'Fluoro-adenosine
  modified_base 17: mod_base = gm
  modified_base 18: mod_base = gm
  modified_base 19: mod_base = cm
  modified_base 20: mod_base = OTHER; note = 2'O-methyl-adenosine
  modified_base 21: mod_base = OTHER; note = 2'O-methyl-adenosine
  modified_base 22: mod_base = OTHER; note = 2'O-methyl-adenosine
  modified_base 23: mod_base = OTHER; note = 2'O-methyl-adenosine
  modified_base 1^2: mod_base = OTHER; note = phosphorothioate linkage
  modified_base 2^3: mod_base = OTHER; note = phosphorothioate linkage
  modified_base 21^22: mod_base = OTHER; note = phosphorothioate linkage
  modified_base 22^23: mod_base = OTHER; note = phosphorothioate linkage
aatccttgtggatgaaggcaaaa

SEQ ID NO: 541 - RNA, 23 nt, synthetic construct
  source 1..23: mol_type = other RNA
  misc_feature 1..23: note = Antisense: ETXS990; corresponding to SEQ ID NO: 141
  modified_base 1: mod_base = cm
  modified_base 2: mod_base = OTHER; note = 2' Fluoro-cytidine
  modified_base 3: mod_base = OTHER; note = 2'O-methyl-adenosine
  modified_base 4: mod_base = OTHER; note = 2' Fluoro-uridine
  modified_base 5: mod_base = cm
  modified_base 6: mod_base = OTHER; note = 2' Fluoro-guanosine
  modified_base 7: mod_base = um
  modified_base 8: mod_base = OTHER; note = 2' Fluoro-guanosine
  modified_base 9: mod_base = OTHER; note = 2' Fluoro-cytidine
  modified_base 10: mod_base = cm
  modified_base 11: mod_base = um
  modified_base 12: mod_base = cm
  modified_base 13: mod_base = OTHER; note = 2'O-methyl-adenosine
  modified_base 14: mod_base = OTHER; note = 2' Fluoro-uridine
  modified_base 15: mod_base = gm
  modified_base 16: mod_base = OTHER; note = 2' Fluoro-guanosine
  modified_base 17: mod_base = OTHER; note = 2'O-methyl-adenosine
  modified_base 18: mod_base = gm
  modified_base 19: mod_base = OTHER; note = 2'O-methyl-adenosine
  modified_base 20: mod_base = um
  modified_base 21: mod_base = cm
  modified_base 22: mod_base = um
  modified_base 23: mod_base = um
  modified_base 1^2: mod_base = OTHER; note = phosphorothioate linkage
  modified_base 2^3: mod_base = OTHER; note = phosphorothioate linkage
  modified_base 21^22: mod_base = OTHER; note = phosphorothioate linkage
  modified_base 22^23: mod_base = OTHER; note = phosphorothioate linkage
ccatcgtgcctcatggagatctt

SEQ ID NO: 542 - RNA, 23 nt, synthetic construct
  source 1..23: mol_type = other RNA
  misc_feature 1..23: note = Antisense: ETXS992; corresponding to SEQ ID NO: 122
  modified_base 1: mod_base = OTHER; note = 2'O-methyl-adenosine
  modified_base 2: mod_base = OTHER; note = 2'Fluoro-adenosine
  modified_base 3: mod_base = OTHER; note = 2'O-methyl-adenosine
  modified_base 4: mod_base = OTHER; note = 2' Fluoro-uridine
  modified_base 5: mod_base = cm
  modified_base 6: mod_base = OTHER; note = 2' Fluoro-cytidine
  modified_base 7: mod_base = um
  modified_base 8: mod_base = um
  modified_base 9: mod_base = gm
  modified_base 10: mod_base = um
  modified_base 11: mod_base = gm
  modified_base 12: mod_base = gm
  modified_base 13: mod_base = OTHER; note = 2'O-methyl-adenosine
  modified_base 14: mod_base = OTHER; note = 2' Fluoro-uridine
  modified_base 15: mod_base = gm
  modified_base 16: mod_base = OTHER; note = 2'Fluoro-adenosine
  modified_base 17: mod_base = OTHER; note = 2'O-methyl-adenosine
  modified_base 18: mod_base = gm
  modified_base 19: mod_base = gm
  modified_base 20: mod_base = cm
  modified_base 21: mod_base = OTHER; note = 2'O-methyl-adenosine
  modified_base 22: mod_base = OTHER; note = 2'O-methyl-adenosine
  modified_base 23: mod_base = OTHER; note = 2'O-methyl-adenosine
  modified_base 1^2: mod_base = OTHER; note = phosphorothioate linkage
  modified_base 2^3: mod_base = OTHER; note = phosphorothioate linkage
  modified_base 21^22: mod_base = OTHER; note = phosphorothioate linkage
  modified_base 22^23: mod_base = OTHER; note = phosphorothioate linkage
aaatccttgtggatgaaggcaaa

SEQ ID NO: 543 - RNA, 23 nt, synthetic construct
  source 1..23: mol_type = other RNA
  misc_feature 1..23: note = Antisense: ETXS994; corresponding to SEQ ID NO: 123
  modified_base 1: mod_base = gm
  modified_base 2: mod_base = OTHER; note = 2' Fluoro-cytidine
  modified_base 3: mod_base = cm
  modified_base 4: mod_base = OTHER; note = 2' Fluoro-uridine
  modified_base 5: mod_base = cm
  modified_base 6: mod_base = OTHER; note = 2'Fluoro-adenosine
  modified_base 7: mod_base = um
  modified_base 8: mod_base = gm
  modified_base 9: mod_base = gm
  modified_base 10: mod_base = OTHER; note = 2'O-methyl-adenosine
  modified_base 11: mod_base = gm
  modified_base 12: mod_base = OTHER; note = 2'O-methyl-adenosine
  modified_base 13: mod_base = um
  modified_base 14: mod_base = OTHER; note = 2' Fluoro-cytidine
  modified_base 15: mod_base = um
  modified_base 16: mod_base = OTHER; note = 2' Fluoro-uridine
  modified_base 17: mod_base = um
  modified_base 18: mod_base = cm
  modified_base 19: mod_base = gm
  modified_base 20: mod_base = cm
  modified_base 21: mod_base = OTHER; note = 2'O-methyl-adenosine
  modified_base 22: mod_base = gm
  modified_base 23: mod_base = cm
  modified_base 1^2: mod_base = OTHER; note = phosphorothioate linkage
  modified_base 2^3: mod_base = OTHER; note = phosphorothioate linkage
  modified_base 21^22: mod_base = OTHER; note = phosphorothioate linkage
  modified_base 22^23: mod_base = OTHER; note = phosphorothioate linkage
gcctcatggagatctttcgcagc

SEQ ID NO: 544 - RNA, 23 nt, synthetic construct
  source 1..23: mol_type = other RNA
  misc_feature 1..23: note = Antisense: ETXS996; corresponding to SEQ ID NO: 124
  modified_base 1: mod_base = um
  modified_base 2: mod_base = OTHER; note = 2' Fluoro-uridine
  modified_base 3: mod_base = cm
  modified_base 4: mod_base = OTHER; note = 2' Fluoro-uridine
  modified_base 5: mod_base = cm
  modified_base 6: mod_base = OTHER; note = 2' Fluoro-cytidine
  modified_base 7: mod_base = OTHER; note = 2'O-methyl-adenosine
  modified_base 8: mod_base = um
  modified_base 9: mod_base = gm
  modified_base 10: mod_base = OTHER; note = 2'O-methyl-adenosine
  modified_base 11: mod_base = gm
  modified_base 12: mod_base = gm
  modified_base 13: mod_base = OTHER; note = 2'O-methyl-adenosine
  modified_base 14: mod_base = OTHER; note = 2' Fluoro-cytidine
  modified_base 15: mod_base = cm
  modified_base 16: mod_base = OTHER; note = 2'Fluoro-adenosine
  modified_base 17: mod_base = cm
  modified_base 18: mod_base = cm
  modified_base 19: mod_base = OTHER; note = 2'O-methyl-adenosine
  modified_base 20: mod_base = gm
  modified_base 21: mod_base = cm
  modified_base 22: mod_base = OTHER; note = 2'O-methyl-adenosine
  modified_base 23: mod_base = um
  modified_base 1^2: mod_base = OTHER; note = phosphorothioate linkage
  modified_base 2^3: mod_base = OTHER; note = phosphorothioate linkage
  modified_base 21^22: mod_base = OTHER; note = phosphorothioate linkage
  modified_base 22^23: mod_base = OTHER; note = phosphorothioate linkage
ttctccatgaggaccaccagcat

SEQ ID NO: 545 - RNA, 23 nt, synthetic construct
  source 1..23: mol_type = other RNA
  misc_feature 1..23: note = Antisense: ETXS998; corresponding to SEQ ID NO: 125
  modified_base 1: mod_base = um
  modified_base 2: mod_base = OTHER; note = 2' Fluoro-guanosine
  modified_base 3: mod_base = cm
  modified_base 4: mod_base = OTHER; note = 2' Fluoro-cytidine
  modified_base 5: mod_base = um
  modified_base 6: mod_base = OTHER; note = 2' Fluoro-cytidine
  modified_base 7: mod_base = OTHER; note = 2'O-methyl-adenosine
  modified_base 8: mod_base = um
  modified_base 9: mod_base = gm
  modified_base 10: mod_base = gm
  modified_base 11: mod_base = OTHER; note = 2'O-methyl-adenosine
  modified_base 12: mod_base = gm
  modified_base 13: mod_base = OTHER; note = 2'O-methyl-adenosine
  modified_base 14: mod_base = OTHER; note = 2' Fluoro-uridine
  modified_base 15: mod_base = cm
  modified_base 16: mod_base = OTHER; note = 2' Fluoro-uridine
  modified_base 17: mod_base = um
  modified_base 18: mod_base = um
  modified_base 19: mod_base = cm
  modified_base 20: mod_base = gm
  modified_base 21: mod_base = cm
  modified_base 22: mod_base = OTHER; note = 2'O-methyl-adenosine
  modified_base 23: mod_base = gm
  modified_base 1^2: mod_base = OTHER; note = phosphorothioate linkage
  modified_base 2^3: mod_base = OTHER; note = phosphorothioate linkage
  modified_base 21^22: mod_base = OTHER; note = phosphorothioate linkage
  modified_base 22^23: mod_base = OTHER; note = phosphorothioate linkage
tgcctcatggagatctttcgcag

SEQ ID NO: 546 - RNA, 23 nt, synthetic construct
  source 1..23: mol_type = other RNA
  misc_feature 1..23: note = Antisense: ETXS1000; corresponding to SEQ ID NO: 126
  modified_base 1: mod_base = OTHER; note = 2'O-methyl-adenosine
  modified_base 2: mod_base = OTHER; note = 2' Fluoro-guanosine
  modified_base 3: mod_base = cm
  modified_base 4: mod_base = OTHER; note = 2'Fluoro-adenosine
  modified_base 5: mod_base = gm
  modified_base 6: mod_base = OTHER; note = 2' Fluoro-cytidine
  modified_base 7: mod_base = um
  modified_base 8: mod_base = cm
  modified_base 9: mod_base = OTHER; note = 2'O-methyl-adenosine
  modified_base 10: mod_base = um
  modified_base 11: mod_base = gm
  modified_base 12: mod_base = cm
  modified_base 13: mod_base = OTHER; note = 2'O-methyl-adenosine
  modified_base 14: mod_base = OTHER; note = 2' Fluoro-uridine
  modified_base 15: mod_base = cm
  modified_base 16: mod_base = OTHER; note = 2' Fluoro-uridine
  modified_base 17: mod_base = cm
  modified_base 18: mod_base = OTHER; note = 2'O-methyl-adenosine
  modified_base 19: mod_base = um
  modified_base 20: mod_base = OTHER; note = 2'O-methyl-adenosine
  modified_base 21: mod_base = cm
  modified_base 22: mod_base = um
  modified_base 23: mod_base = um
  modified_base 1^2: mod_base = OTHER; note = phosphorothioate linkage
  modified_base 2^3: mod_base = OTHER; note = phosphorothioate linkage
  modified_base 21^22: mod_base = OTHER; note = phosphorothioate linkage
  modified_base 22^23: mod_base = OTHER; note = phosphorothioate linkage
agcagctcatgcatctcatactt

SEQ ID NO: 547 - RNA, 23 nt, synthetic construct
  source 1..23: mol_type = other RNA
  misc_feature 1..23: note = Antisense: ETXS1002; corresponding to SEQ ID NO: 127
  modified_base 1: mod_base = um
  modified_base 2: mod_base = OTHER; note = 2' Fluoro-cytidine
  modified_base 3: mod_base = OTHER; note = 2'O-methyl-adenosine
  modified_base 4: mod_base = OTHER; note = 2' Fluoro-guanosine
  modified_base 5: mod_base = gm
  modified_base 6: mod_base = OTHER; note = 2'Fluoro-adenosine
  modified_base 7: mod_base = um
  modified_base 8: mod_base = um
  modified_base 9: mod_base = OTHER; note = 2'O-methyl-adenosine
  modified_base 10: mod_base = OTHER; note = 2'O-methyl-adenosine
  modified_base 11: mod_base = um
  modified_base 12: mod_base = cm
  modified_base 13: mod_base = um
  modified_base 14: mod_base = OTHER; note = 2' Fluoro-cytidine
  modified_base 15: mod_base = OTHER; note = 2'O-methyl-adenosine
  modified_base 16: mod_base = OTHER; note = 2' Fluoro-uridine
  modified_base 17: mod_base = cm
  modified_base 18: mod_base = OTHER; note = 2'O-methyl-adenosine
  modified_base 19: mod_base = OTHER; note = 2'O-methyl-adenosine
  modified_base 20: mod_base = OTHER; note = 2'O-methyl-adenosine
  modified_base 21: mod_base = cm
  modified_base 22: mod_base = OTHER; note = 2'O-methyl-adenosine
  modified_base 23: mod_base = gm
  modified_base 1^2: mod_base = OTHER; note = phosphorothioate linkage
  modified_base 2^3: mod_base = OTHER; note = phosphorothioate linkage
  modified_base 21^22: mod_base = OTHER; note = phosphorothioate linkage
  modified_base 22^23: mod_base = OTHER; note = phosphorothioate linkage
tcaggattaatctcatcaaacag

SEQ ID NO: 548 - RNA, 23 nt, synthetic construct
  source 1..23: mol_type = other RNA
  misc_feature 1..23: note = Antisense: ETXS1004; corresponding to SEQ ID NO: 128
  modified_base 1: mod_base = um
  modified_base 2: mod_base = OTHER; note = 2' Fluoro-uridine
  modified_base 3: mod_base = gm
  modified_base 4: mod_base = OTHER; note = 2' Fluoro-guanosine
  modified_base 5: mod_base = um
  modified_base 6: mod_base = OTHER; note = 2' Fluoro-uridine
  modified_base 7: mod_base = um
  modified_base 8: mod_base = cm
  modified_base 9: mod_base = OTHER; note = 2'O-methyl-adenosine
  modified_base 10: mod_base = gm
  modified_base 11: mod_base = gm
  modified_base 12: mod_base = OTHER; note = 2'O-methyl-adenosine
  modified_base 13: mod_base = um
  modified_base 14: mod_base = OTHER; note = 2' Fluoro-uridine
  modified_base 15: mod_base = OTHER; note = 2'O-methyl-adenosine
  modified_base 16: mod_base = OTHER; note = 2'Fluoro-adenosine
  modified_base 17: mod_base = um
  modified_base 18: mod_base = cm
  modified_base 19: mod_base = um
  modified_base 20: mod_base = cm
  modified_base 21: mod_base = OTHER; note = 2'O-methyl-adenosine
  modified_base 22: mod_base = um
  modified_base 23: mod_base = cm
  modified_base 1^2: mod_base = OTHER; note = phosphorothioate linkage
  modified_base 2^3: mod_base = OTHER; note = phosphorothioate linkage
  modified_base 21^22: mod_base = OTHER; note = phosphorothioate linkage
  modified_base 22^23: mod_base = OTHER; note = phosphorothioate linkage
ttggtttcaggattaatctcatc

SEQ ID NO: 549 - RNA, 23 nt, synthetic construct
  source 1..23: mol_type = other RNA
  misc_feature 1..23: note = Antisense: ETXS1006; corresponding to SEQ ID NO: 129
  modified_base 1: mod_base = gm
  modified_base 2: mod_base = OTHER; note = 2' Fluoro-uridine
  modified_base 3: mod_base = um
  modified_base 4: mod_base = OTHER; note = 2' Fluoro-uridine
  modified_base 5: mod_base = cm
  modified_base 6: mod_base = OTHER; note = 2'Fluoro-adenosine
  modified_base 7: mod_base = gm
  modified_base 8: mod_base = gm
  modified_base 9: mod_base = OTHER; note = 2'O-methyl-adenosine
  modified_base 10: mod_base = um
  modified_base 11: mod_base = um
  modified_base 12: mod_base = OTHER; note = 2'O-methyl-adenosine
  modified_base 13: mod_base = OTHER; note = 2'O-methyl-adenosine
  modified_base 14: mod_base = OTHER; note = 2' Fluoro-uridine
  modified_base 15: mod_base = cm
  modified_base 16: mod_base = OTHER; note = 2' Fluoro-uridine
  modified_base 17: mod_base = cm
  modified_base 18: mod_base = OTHER; note = 2'O-methyl-adenosine
  modified_base 19: mod_base = um
  modified_base 20: mod_base = cm
  modified_base 21: mod_base = OTHER; note = 2'O-methyl-adenosine
  modified_base 22: mod_base = OTHER; note = 2'O-methyl-adenosine
  modified_base 23: mod_base = OTHER; note = 2'O-methyl-adenosine
  modified_base 1^2: mod_base = OTHER; note = phosphorothioate linkage
  modified_base 2^3: mod_base = OTHER; note = phosphorothioate linkage
  modified_base 21^22: mod_base = OTHER; note = phosphorothioate linkage
  modified_base 22^23: mod_base = OTHER; note = phosphorothioate linkage
gtttcaggattaatctcatcaaa

SEQ ID NO: 550 - RNA, 23 nt, synthetic construct
  source 1..23: mol_type = other RNA
  misc_feature 1..23: note = Antisense: ETXS1008; corresponding to SEQ ID NO: 130
  modified_base 1: mod_base = um
  modified_base 2: mod_base = OTHER; note = 2' Fluoro-guanosine
  modified_base 3: mod_base = gm
  modified_base 4: mod_base = OTHER; note = 2' Fluoro-uridine
  modified_base 5: mod_base = um
  modified_base 6: mod_base = OTHER; note = 2' Fluoro-uridine
  modified_base 7: mod_base = cm
  modified_base 8: mod_base = OTHER; note = 2'O-methyl-adenosine
  modified_base 9: mod_base = gm
  modified_base 10: mod_base = gm
  modified_base 11: mod_base = OTHER; note = 2'O-methyl-adenosine
  modified_base 12: mod_base = um
  modified_base 13: mod_base = um
  modified_base 14: mod_base = OTHER; note = 2'Fluoro-adenosine
  modified_base 15: mod_base = OTHER; note = 2'O-methyl-adenosine
  modified_base 16: mod_base = OTHER; note = 2' Fluoro-uridine
  modified_base 17: mod_base = cm
  modified_base 18: mod_base = um
  modified_base 19: mod_base = cm
  modified_base 20: mod_base = OTHER; note = 2'O-methyl-adenosine
  modified_base 21: mod_base = um
  modified_base 22: mod_base = cm
  modified_base 23: mod_base = OTHER; note = 2'O-methyl-adenosine
  modified_base 1^2: mod_base = OTHER; note = phosphorothioate linkage
  modified_base 2^3: mod_base = OTHER; note = phosphorothioate linkage
  modified_base 21^22: mod_base = OTHER; note = phosphorothioate linkage
  modified_base 22^23: mod_base = OTHER; note = phosphorothioate linkage
tggtttcaggattaatctcatca

SEQ ID NO: 551 - RNA, 23 nt, synthetic construct
  source 1..23: mol_type = other RNA
  misc_feature 1..23: note = Antisense: ETXS1010; corresponding to SEQ ID NO: 131
  modified_base 1: mod_base = gm
  modified_base 2: mod_base = OTHER; note = 2' Fluoro-guanosine
  modified_base 3: mod_base = um
  modified_base 4: mod_base = OTHER; note = 2' Fluoro-uridine
  modified_base 5: mod_base = um
  modified_base 6: mod_base = OTHER; note = 2' Fluoro-cytidine
  modified_base 7: mod_base = OTHER; note = 2'O-methyl-adenosine
  modified_base 8: mod_base = gm
  modified_base 9: mod_base = gm
  modified_base 10: mod_base = OTHER; note = 2'O-methyl-adenosine
  modified_base 11: mod_base = um
  modified_base 12: mod_base = um
  modified_base 13: mod_base = OTHER; note = 2'O-methyl-adenosine
  modified_base 14: mod_base = OTHER; note = 2'Fluoro-adenosine
  modified_base 15: mod_base = um
  modified_base 16: mod_base = OTHER; note = 2' Fluoro-cytidine
  modified_base 17: mod_base = um
  modified_base 18: mod_base = cm
  modified_base 19: mod_base = OTHER; note = 2'O-methyl-adenosine
  modified_base 20: mod_base = um
  modified_base 21: mod_base = cm
  modified_base 22: mod_base = OTHER; note = 2'O-methyl-adenosine
  modified_base 23: mod_base = OTHER; note = 2'O-methyl-adenosine
  modified_base 1^2: mod_base = OTHER; note = phosphorothioate linkage
  modified_base 2^3: mod_base = OTHER; note = phosphorothioate linkage
  modified_base 21^22: mod_base = OTHER; note = phosphorothioate linkage
  modified_base 22^23: mod_base = OTHER; note = phosphorothioate linkage
ggtttcaggattaatctcatcaa

SEQ ID NO: 552 - RNA, 23 nt, synthetic construct
  source 1..23: mol_type = other RNA
  misc_feature 1..23: note = Antisense: ETXS1012; corresponding to SEQ ID NO: 132
  modified_base 1: mod_base = OTHER; note = 2'O-methyl-adenosine
  modified_base 2: mod_base = OTHER; note = 2' Fluoro-guanosine
  modified_base 3: mod_base = gm
  modified_base 4: mod_base = OTHER; note = 2'Fluoro-adenosine
  modified_base 5: mod_base = um
  modified_base 6: mod_base = OTHER; note = 2' Fluoro-uridine
  modified_base 7: mod_base = OTHER; note = 2'O-methyl-adenosine
  modified_base 8: mod_base = OTHER; note = 2'O-methyl-adenosine
  modified_base 9: mod_base = um
  modified_base 10: mod_base = cm
  modified_base 11: mod_base = um
  modified_base 12: mod_base = cm
  modified_base 13: mod_base = OTHER; note = 2'O-methyl-adenosine
  modified_base 14: mod_base = OTHER; note = 2' Fluoro-uridine
  modified_base 15: mod_base = cm
  modified_base 16: mod_base = OTHER; note = 2'Fluoro-adenosine
  modified_base 17: mod_base = OTHER; note = 2'O-methyl-adenosine
  modified_base 18: mod_base = OTHER; note = 2'O-methyl-adenosine
  modified_base 19: mod_base = cm
  modified_base 20: mod_base = OTHER; note = 2'O-methyl-adenosine
  modified_base 21: mod_base = gm
  modified_base 22: mod_base = um
  modified_base 23: mod_base = um
  modified_base 1^2: mod_base = OTHER; note = phosphorothioate linkage
  modified_base 2^3: mod_base = OTHER; note = phosphorothioate linkage
  modified_base 21^22: mod_base = OTHER; note = phosphorothioate linkage
  modified_base 22^23: mod_base = OTHER; note = phosphorothioate linkage
aggattaatctcatcaaacagtt

SEQ ID NO: 553 - RNA, 23 nt, synthetic construct
  source 1..23: mol_type = other RNA
  misc_feature 1..23: note = Antisense: ETXS1014; corresponding to SEQ ID NO: 133
  modified_base 1: mod_base = um
  modified_base 2: mod_base = OTHER; note = 2' Fluoro-cytidine
  modified_base 3: mod_base = cm
  modified_base 4: mod_base = OTHER; note = 2' Fluoro-uridine
  modified_base 5: mod_base = um
  modified_base 6: mod_base = OTHER; note = 2' Fluoro-guanosine
  modified_base 7: mod_base = um
  modified_base 8: mod_base = gm
  modified_base 9: mod_base = gm
  modified_base 10: mod_base = OTHER; note = 2'O-methyl-adenosine
  modified_base 11: mod_base = um
  modified_base 12: mod_base = gm
  modified_base 13: mod_base = OTHER; note = 2'O-methyl-adenosine
  modified_base 14: mod_base = OTHER; note = 2'Fluoro-adenosine
  modified_base 15: mod_base = gm
  modified_base 16: mod_base = OTHER; note = 2' Fluoro-guanosine
  modified_base 17: mod_base = cm
  modified_base 18: mod_base = OTHER; note = 2'O-methyl-adenosine
  modified_base 19: mod_base = OTHER; note = 2'O-methyl-adenosine
  modified_base 20: mod_base = OTHER; note = 2'O-methyl-adenosine
  modified_base 21: mod_base = OTHER; note = 2'O-methyl-adenosine
  modified_base 22: mod_base = cm
  modified_base 23: mod_base = um
  modified_base 1^2: mod_base = OTHER; note = phosphorothioate linkage
  modified_base 2^3: mod_base = OTHER; note = phosphorothioate linkage
  modified_base 21^22: mod_base = OTHER; note = phosphorothioate linkage
  modified_base 22^23: mod_base = OTHER; note = phosphorothioate linkage
tccttgtggatgaaggcaaaact

SEQ ID NO: 554 - RNA, 23 nt, synthetic construct
  source 1..23: mol_type = other RNA
  misc_feature 1..23: note = Antisense: ETXS1016; corresponding to SEQ ID NO: 134
  modified_base 1: mod_base = gm
  modified_base 2: mod_base = OTHER; note = 2' Fluoro-uridine
  modified_base 3: mod_base = gm
  modified_base 4: mod_base = OTHER; note = 2' Fluoro-cytidine
  modified_base 5: mod_base = cm
  modified_base 6: mod_base = OTHER; note = 2' Fluoro-uridine
  modified_base 7: mod_base = cm
  modified_base 8: mod_base = OTHER; note = 2'O-methyl-adenosine
  modified_base 9: mod_base = um
  modified_base 10: mod_base = gm
  modified_base 11: mod_base = gm
  modified_base 12: mod_base = OTHER; note = 2'O-methyl-adenosine
  modified_base 13: mod_base = gm
  modified_base 14: mod_base = OTHER; note = 2'Fluoro-adenosine
  modified_base 15: mod_base = um
  modified_base 16: mod_base = OTHER; note = 2' Fluoro-cytidine
  modified_base 17: mod_base = um
  modified_base 18: mod_base = um
  modified_base 19: mod_base = um
  modified_base 20: mod_base = cm
  modified_base 21: mod_base = gm
  modified_base 22: mod_base = cm
  modified_base 23: mod_base = OTHER; note = 2'O-methyl-adenosine
  modified_base 1^2: mod_base = OTHER; note = phosphorothioate linkage
  modified_base 2^3: mod_base = OTHER; note = phosphorothioate linkage
  modified_base 21^22: mod_base = OTHER; note = phosphorothioate linkage
  modified_base 22^23: mod_base = OTHER; note = phosphorothioate linkage
gtgcctcatggagatctttcgca

SEQ ID NO: 555 - RNA, 23 nt, synthetic construct
  source 1..23: mol_type = other RNA
  misc_feature 1..23: note = Antisense: ETXS1018; corresponding to SEQ ID NO: 135
  modified_base 1: mod_base = um
  modified_base 2: mod_base = OTHER; note = 2' Fluoro-cytidine
  modified_base 3: mod_base = um
  modified_base 4: mod_base = OTHER; note = 2' Fluoro-cytidine
  modified_base 5: mod_base = cm
  modified_base 6: mod_base = OTHER; note = 2'Fluoro-adenosine
  modified_base 7: mod_base = um
  modified_base 8: mod_base = gm
  modified_base 9: mod_base = OTHER; note = 2'O-methyl-adenosine
  modified_base 10: mod_base = gm
  modified_base 11: mod_base = gm
  modified_base 12: mod_base = OTHER; note = 2'O-methyl-adenosine
  modified_base 13: mod_base = cm
  modified_base 14: mod_base = OTHER; note = 2' Fluoro-cytidine
  modified_base 15: mod_base = OTHER; note = 2'O-methyl-adenosine
  modified_base 16: mod_base = OTHER; note = 2' Fluoro-cytidine
  modified_base 17: mod_base = cm
  modified_base 18: mod_base = OTHER; note = 2'O-methyl-adenosine
  modified_base 19: mod_base = gm
  modified_base 20: mod_base = cm
  modified_base 21: mod_base = OTHER; note = 2'O-methyl-adenosine
  modified_base 22: mod_base = um
  modified_base 23: mod_base = gm
  modified_base 1^2: mod_base = OTHER; note = phosphorothioate linkage
  modified_base 2^3: mod_base = OTHER; note = phosphorothioate linkage
  modified_base 21^22: mod_base = OTHER; note = phosphorothioate linkage
  modified_base 22^23: mod_base = OTHER; note = phosphorothioate linkage
tctccatgaggaccaccagcatg

SEQ ID NO: 556 - RNA, 23 nt, synthetic construct
  source 1..23: mol_type = other RNA
  misc_feature 1..23: note = Antisense: ETXS1020; corresponding to SEQ ID NO: 136
  modified_base 1: mod_base = cm
  modified_base 2: mod_base = OTHER; note = 2'Fluoro-adenosine
  modified_base 3: mod_base = OTHER; note = 2'O-methyl-adenosine
  modified_base 4: mod_base = OTHER; note = 2'Fluoro-adenosine
  modified_base 5: mod_base = OTHER; note = 2'O-methyl-adenosine
  modified_base 6: mod_base = OTHER; note = 2' Fluoro-uridine
  modified_base 7: mod_base = cm
  modified_base 8: mod_base = cm
  modified_base 9: mod_base = um
  modified_base 10: mod_base = um
  modified_base 11: mod_base = gm
  modified_base 12: mod_base = um
  modified_base 13: mod_base = gm
  modified_base 14: mod_base = OTHER; note = 2' Fluoro-guanosine
  modified_base 15: mod_base = OTHER; note = 2'O-methyl-adenosine
  modified_base 16: mod_base = OTHER; note = 2' Fluoro-uridine
  modified_base 17: mod_base = gm
  modified_base 18: mod_base = OTHER; note = 2'O-methyl-adenosine
  modified_base 19: mod_base = OTHER; note = 2'O-methyl-adenosine
  modified_base 20: mod_base = gm
  modified_base 21: mod_base = gm
  modified_base 22: mod_base = cm
  modified_base 23: mod_base = OTHER; note = 2'O-methyl-adenosine
  modified_base 1^2: mod_base = OTHER; note = phosphorothioate linkage
  modified_base 2^3: mod_base = OTHER; note = phosphorothioate linkage
  modified_base 21^22: mod_base = OTHER; note = phosphorothioate linkage
  modified_base 22^23: mod_base = OTHER; note = phosphorothioate linkage
caaaatccttgtggatgaaggca

SEQ ID NO: 557 - RNA, 23 nt, synthetic construct
  source 1..23: mol_type = other RNA
  misc_feature 1..23: note = Antisense: ETXS1022; corresponding to SEQ ID NO: 137
  modified_base 1: mod_base = cm
  modified_base 2: mod_base = OTHER; note = 2' Fluoro-guanosine
  modified_base 3: mod_base = um
  modified_base 4: mod_base = OTHER; note = 2' Fluoro-guanosine
  modified_base 5: mod_base = cm
  modified_base 6: mod_base = OTHER; note = 2' Fluoro-cytidine
  modified_base 7: mod_base = um
  modified_base 8: mod_base = cm
  modified_base 9: mod_base = OTHER; note = 2'O-methyl-adenosine
  modified_base 10: mod_base = um
  modified_base 11: mod_base = gm
  modified_base 12: mod_base = gm
  modified_base 13: mod_base = OTHER; note = 2'O-methyl-adenosine
  modified_base 14: mod_base = OTHER; note = 2' Fluoro-guanosine
  modified_base 15: mod_base = OTHER; note = 2'O-methyl-adenosine
  modified_base 16: mod_base = OTHER; note = 2' Fluoro-uridine
  modified_base 17: mod_base = cm
  modified_base 18: mod_base = um
  modified_base 19: mod_base = um
  modified_base 20: mod_base = um
  modified_base 21: mod_base = cm
  modified_base 22: mod_base = gm
  modified_base 23: mod_base = cm
  modified_base 1^2: mod_base = OTHER; note = phosphorothioate linkage
  modified_base 2^3: mod_base = OTHER; note = phosphorothioate linkage
  modified_base 21^22: mod_base = OTHER; note = phosphorothioate linkage
  modified_base 22^23: mod_base = OTHER; note = phosphorothioate linkage
cgtgcctcatggagatctttcgc

SEQ ID NO: 558 - RNA, 23 nt, synthetic construct
  source 1..23: mol_type = other RNA
  misc_feature 1..23: note = Antisense: ETXS1024; corresponding to SEQ ID NO: 138
  modified_base 1: mod_base = OTHER; note = 2'O-methyl-adenosine
  modified_base 2: mod_base = OTHER; note = 2' Fluoro-uridine
  modified_base 3: mod_base = cm
  modified_base 4: mod_base = OTHER; note = 2'Fluoro-adenosine
  modified_base 5: mod_base = OTHER; note = 2'O-methyl-adenosine
  modified_base 6: mod_base = OTHER; note = 2'Fluoro-adenosine
  modified_base 7: mod_base = OTHER; note = 2'O-methyl-adenosine
  modified_base 8: mod_base = um
  modified_base 9: mod_base = cm
  modified_base 10: mod_base = cm
  modified_base 11: mod_base = um
  modified_base 12: mod_base = um
  modified_base 13: mod_base = gm
  modified_base 14: mod_base = OTHER; note = 2' Fluoro-uridine
  modified_base 15: mod_base = gm
  modified_base 16: mod_base = OTHER; note = 2' Fluoro-guanosine
  modified_base 17: mod_base = OTHER; note = 2'O-methyl-adenosine
  modified_base 18: mod_base = um
  modified_base 19: mod_base = gm
  modified_base 20: mod_base = OTHER; note = 2'O-methyl-adenosine
  modified_base 21: mod_base = OTHER; note = 2'O-methyl-adenosine
  modified_base 22: mod_base = gm
  modified_base 23: mod_base = gm
  modified_base 1^2: mod_base = OTHER; note = phosphorothioate linkage
  modified_base 2^3: mod_base = OTHER; note = phosphorothioate linkage
  modified_base 21^22: mod_base = OTHER; note = phosphorothioate linkage
  modified_base 22^23: mod_base = OTHER; note = phosphorothioate linkage
atcaaaatccttgtggatgaagg

SEQ ID NO: 559 - RNA, 23 nt, synthetic construct
  source 1..23: mol_type = other RNA
  misc_feature 1..23: note = Antisense: ETXS1026; corresponding to SEQ ID NO: 139
  modified_base 1: mod_base = um
  modified_base 2: mod_base = OTHER; note = 2' Fluoro-uridine
  modified_base 3: mod_base = cm
  modified_base 4: mod_base = OTHER; note = 2'Fluoro-adenosine
  modified_base 5: mod_base = gm
  modified_base 6: mod_base = OTHER; note = 2' Fluoro-guanosine
  modified_base 7: mod_base = OTHER; note = 2'O-methyl-adenosine
  modified_base 8: mod_base = um
  modified_base 9: mod_base = um
  modified_base 10: mod_base = OTHER; note = 2'O-methyl-adenosine
  modified_base 11: mod_base = OTHER; note = 2'O-methyl-adenosine
  modified_base 12: mod_base = um
  modified_base 13: mod_base = cm
  modified_base 14: mod_base = OTHER; note = 2' Fluoro-uridine
  modified_base 15: mod_base = cm
  modified_base 16: mod_base = OTHER; note = 2'Fluoro-adenosine
  modified_base 17: mod_base = um
  modified_base 18: mod_base = cm
  modified_base 19: mod_base = OTHER; note = 2'O-methyl-adenosine
  modified_base 20: mod_base = OTHER; note = 2'O-methyl-adenosine
  modified_base 21: mod_base = OTHER; note = 2'O-methyl-adenosine
  modified_base 22: mod_base = cm
  modified_base 23: mod_base = OTHER; note = 2'O-methyl-adenosine
  modified_base 1^2: mod_base = OTHER; note = phosphorothioate linkage
  modified_base 2^3: mod_base = OTHER; note = phosphorothioate linkage
  modified_base 21^22: mod_base = OTHER; note = phosphorothioate linkage
  modified_base 22^23: mod_base = OTHER; note = phosphorothioate linkage
ttcaggattaatctcatcaaaca

SEQ ID NO: 560 - RNA, 23 nt, synthetic construct
  source 1..23: mol_type = other RNA
  misc_feature 1..23: note = Antisense: ETXS1028; corresponding to SEQ ID NO: 140
  modified_base 1: mod_base = OTHER; note = 2'O-methyl-adenosine
  modified_base 2: mod_base = OTHER; note = 2'Fluoro-adenosine
  modified_base 3: mod_base = um
  modified_base 4: mod_base = OTHER; note = 2' Fluoro-cytidine
  modified_base 5: mod_base = cm
  modified_base 6: mod_base = OTHER; note = 2' Fluoro-uridine
  modified_base 7: mod_base = um
  modified_base 8: mod_base = gm
  modified_base 9: mod_base = um
  modified_base 10: mod_base = gm
  modified_base 11: mod_base = gm
  modified_base 12: mod_base = OTHER; note = 2'O-methyl-adenosine
  modified_base 13: mod_base = um
  modified_base 14: mod_base = OTHER; note = 2' Fluoro-guanosine
  modified_base 15: mod_base = OTHER; note = 2'O-methyl-adenosine
  modified_base 16: mod_base = OTHER; note = 2'Fluoro-adenosine
  modified_base 17: mod_base = gm
  modified_base 18: mod_base = gm
  modified_base 19: mod_base = cm
  modified_base 20: mod_base = OTHER; note = 2'O-methyl-adenosine
  modified_base 21: mod_base = OTHER; note = 2'O-methyl-adenosine
  modified_base 22: mod_base = OTHER; note = 2'O-methyl-adenosine
  modified_base 23: mod_base = OTHER; note = 2'O-methyl-adenosine
  modified_base 1^2: mod_base = OTHER; note = phosphorothioate linkage
  modified_base 2^3: mod_base = OTHER; note = phosphorothioate linkage
  modified_base 21^22: mod_base = OTHER; note = phosphorothioate linkage
  modified_base 22^23: mod_base = OTHER; note = phosphorothioate linkage
aatccttgtggatgaaggcaaaa

SEQ ID NO: 561 - RNA, 23 nt, synthetic construct
  source 1..23: mol_type = other RNA
  misc_feature 1..23: note = Antisense: ETXS1030; corresponding to SEQ ID NO: 141
  modified_base 1: mod_base = cm
  modified_base 2: mod_base = OTHER; note = 2' Fluoro-cytidine
  modified_base 3: mod_base = OTHER; note = 2'O-methyl-adenosine
  modified_base 4: mod_base = OTHER; note = 2' Fluoro-uridine
  modified_base 5: mod_base = cm
  modified_base 6: mod_base = OTHER; note = 2' Fluoro-guanosine
  modified_base 7: mod_base = um
  modified_base 8: mod_base = gm
  modified_base 9: mod_base = cm
  modified_base 10: mod_base = cm
  modified_base 11: mod_base = um
  modified_base 12: mod_base = cm
  modified_base 13: mod_base = OTHER; note = 2'O-methyl-adenosine
  modified_base 14: mod_base = OTHER; note = 2' Fluoro-uridine
  modified_base 15: mod_base = gm
  modified_base 16: mod_base = OTHER; note = 2' Fluoro-guanosine
  modified_base 17: mod_base = OTHER; note = 2'O-methyl-adenosine
  modified_base 18: mod_base = gm
  modified_base 19: mod_base = OTHER; note = 2'O-methyl-adenosine
  modified_base 20: mod_base = um
  modified_base 21: mod_base = cm
  modified_base 22: mod_base = um
  modified_base 23: mod_base = um
  modified_base 1^2: mod_base = OTHER; note = phosphorothioate linkage
  modified_base 2^3: mod_base = OTHER; note = phosphorothioate linkage
  modified_base 21^22: mod_base = OTHER; note = phosphorothioate linkage
  modified_base 22^23: mod_base = OTHER; note = phosphorothioate linkage
ccatcgtgcctcatggagatctt

SEQ ID NO: 562 - RNA, 21 nt, synthetic construct
  source 1..21: mol_type = other RNA
  misc_feature 1..21: note = Description: ZPI siRNA sense strand: ETXS631; corresponding to SEQ ID NO: 242
  modified_base 1: mod_base = um
  modified_base 2: mod_base = gm
  modified_base 3: mod_base = cm
  modified_base 4: mod_base = cm
  modified_base 5: mod_base = um
  modified_base 6: mod_base = um
  modified_base 7: mod_base = OTHER; note = 2' Fluoro-cytidine
  modified_base 8: mod_base = OTHER; note = 2'O-methyl-adenosine
  modified_base 9: mod_base = OTHER; note = 2' Fluoro-uridine
  modified_base 10: mod_base = OTHER; note = 2' Fluoro-cytidine
  modified_base 11: mod_base = OTHER; note = 2' Fluoro-cytidine
  modified_base 12: mod_base = OTHER; note = 2'O-methyl-adenosine
  modified_base 13: mod_base = cm
  modified_base 14: mod_base = OTHER; note = 2'O-methyl-adenosine
  modified_base 15: mod_base = OTHER; note = 2'O-methyl-adenosine
  modified_base 16: mod_base = gm
  modified_base 17: mod_base = gm
  modified_base 18: mod_base = OTHER; note = 2'O-methyl-adenosine
  modified_base 19: mod_base = um
  modified_base 20: mod_base = um
  modified_base 21: mod_base = um
  modified_base 1^2: mod_base = OTHER; note = phosphorothioate linkage
  modified_base 2^3: mod_base = OTHER; note = phosphorothioate linkage
tgccttcatccacaaggattt

SEQ ID NO: 563 - RNA, 21 nt, synthetic construct
  source 1..21: mol_type = other RNA
  misc_feature 1..21: note = Description: ZPI siRNA sense strand: ETXS633; corresponding to SEQ ID NO: 243
  modified_base 1: mod_base = um
  modified_base 2: mod_base = gm
  modified_base 3: mod_base = cm
  modified_base 4: mod_base = gm
  modified_base 5: mod_base = OTHER; note = 2'O-methyl-adenosine
  modified_base 6: mod_base = OTHER; note = 2'O-methyl-adenosine
  modified_base 7: mod_base = OTHER; note = 2'-Fluoro-adenosine
  modified_base 8: mod_base = gm
  modified_base 9: mod_base = OTHER; note = 2'-Fluoro-adenosine
  modified_base 10: mod_base = OTHER; note = 2' Fluoro-uridine
  modified_base 11: mod_base = OTHER; note = 2' Fluoro-cytidine
  modified_base 12: mod_base = um
  modified_base 13: mod_base = cm
  modified_base 14: mod_base = cm
  modified_base 15: mod_base = OTHER; note = 2'O-methyl-adenosine
  modified_base 16: mod_base = um
  modified_base 17: mod_base = gm
  modified_base 18: mod_base = OTHER; note = 2'O-methyl-adenosine
  modified_base 19: mod_base = gm
  modified_base 20: mod_base = gm
  modified_base 21: mod_base = cm
  modified_base 1^2: mod_base = OTHER; note = phosphorothioate linkage
  modified_base 2^3: mod_base = OTHER; note = phosphorothioate linkage
tgcgaaagatctccatgaggc

SEQ ID NO: 564 - RNA, 21 nt, synthetic construct
  source 1..21: mol_type = other RNA
  misc_feature 1..21: note = Description: ZPI siRNA sense strand: ETXS635; corresponding to SEQ ID NO: 244
  modified_base 1: mod_base = gm
  modified_base 2: mod_base = cm
  modified_base 3: mod_base = um
  modified_base 4: mod_base = gm
  modified_base 5: mod_base = gm
  modified_base 6: mod_base = um
  modified_base 7: mod_base = OTHER; note = 2' Fluoro-guanosine
  modified_base 8: mod_base = gm
  modified_base 9: mod_base = OTHER; note = 2' Fluoro-uridine
  modified_base 10: mod_base = OTHER; note = 2' Fluoro-cytidine
  modified_base 11: mod_base = OTHER; note = 2' Fluoro-cytidine
  modified_base 12: mod_base = um
  modified_base 13: mod_base = cm
  modified_base 14: mod_base = OTHER; note = 2'O-methyl-adenosine
  modified_base 15: mod_base = um
  modified_base 16: mod_base = gm
  modified_base 17: mod_base = gm
  modified_base 18: mod_base = OTHER; note = 2'O-methyl-adenosine
  modified_base 19: mod_base = gm
  modified_base 20: mod_base = OTHER; note = 2'O-methyl-adenosine
  modified_base 21: mod_base = OTHER; note = 2'O-methyl-adenosine
  modified_base 1^2: mod_base = OTHER; note = phosphorothioate linkage
  modified_base 2^3: mod_base = OTHER; note = phosphorothioate linkage
gctggtggtcctcatggagaa

SEQ ID NO: 565 - RNA, 21 nt, synthetic construct
  source 1..21: mol_type = other RNA
  misc_feature 1..21: note = Description: ZPI siRNA sense strand: ETXS637; corresponding to SEQ ID NO: 245
  modified_base 1: mod_base = gm
  modified_base 2: mod_base = cm
  modified_base 3: mod_base = gm
  modified_base 4: mod_base = OTHER; note = 2'O-methyl-adenosine
  modified_base 5: mod_base = OTHER; note = 2'O-methyl-adenosine
  modified_base 6: mod_base = OTHER; note = 2'O-methyl-adenosine
  modified_base 7: mod_base = OTHER; note = 2' Fluoro-guanosine
  modified_base 8: mod_base = OTHER; note = 2'O-methyl-adenosine
  modified_base 9: mod_base = OTHER; note = 2' Fluoro-uridine
  modified_base 10: mod_base = OTHER; note = 2' Fluoro-cytidine
  modified_base 11: mod_base = OTHER; note = 2' Fluoro-uridine
  modified_base 12: mod_base = cm
  modified_base 13: mod_base = cm
  modified_base 14: mod_base = OTHER; note = 2'O-methyl-adenosine
  modified_base 15: mod_base = um
  modified_base 16: mod_base = gm
  modified_base 17: mod_base = OTHER; note = 2'O-methyl-adenosine
  modified_base 18: mod_base = gm
  modified_base 19: mod_base = gm
  modified_base 20: mod_base = cm
  modified_base 21: mod_base = OTHER; note = 2'O-methyl-adenosine
  modified_base 1^2: mod_base = OTHER; note = phosphorothioate linkage
  modified_base 2^3: mod_base = OTHER; note = phosphorothioate linkage
gcgaaagatctccatgaggca

SEQ ID NO: 566 - RNA, 21 nt, synthetic construct
  source 1..21: mol_type = other RNA
  misc_feature 1..21: note = Description: ZPI siRNA sense strand: ETXS639; corresponding to SEQ ID NO: 246
  modified_base 1: mod_base = gm
  modified_base 2: mod_base = um
  modified_base 3: mod_base = OTHER; note = 2'O-methyl-adenosine
  modified_base 4: mod_base = um
  modified_base 5: mod_base = gm
  modified_base 6: mod_base = OTHER; note = 2'O-methyl-adenosine
  modified_base 7: mod_base = OTHER; note = 2' Fluoro-guanosine
  modified_base 8: mod_base = OTHER; note = 2'O-methyl-adenosine
  modified_base 9: mod_base = OTHER; note = 2' Fluoro-uridine
  modified_base 10: mod_base = OTHER; note = 2' Fluoro-guanosine
  modified_base 11: mod_base = OTHER; note = 2' Fluoro-cytidine
  modified_base 12: mod_base = OTHER; note = 2'O-methyl-adenosine
  modified_base 13: mod_base = um
  modified_base 14: mod_base = gm
  modified_base 15: mod_base = OTHER; note = 2'O-methyl-adenosine
  modified_base 16: mod_base = gm
  modified_base 17: mod_base = cm
  modified_base 18: mod_base = um
  modified_base 19: mod_base = gm
  modified_base 20: mod_base = cm
  modified_base 21: mod_base = um
  modified_base 1^2: mod_base = OTHER; note = phosphorothioate linkage
  modified_base 2^3: mod_base = OTHER; note = phosphorothioate linkage
gtatgagatgcatgagctgct

SEQ ID NO: 567 - RNA, 21 nt, synthetic construct
  source 1..21: mol_type = other RNA
  misc_feature 1..21: note = Description: ZPI siRNA sense strand: ETXS641; corresponding to SEQ ID NO: 247
  modified_base 1: mod_base = gm
  modified_base 2: mod_base = um
  modified_base 3: mod_base = um
  modified_base 4: mod_base = um
  modified_base 5: mod_base = gm
  modified_base 6: mod_base = OTHER; note = 2'O-methyl-adenosine
  modified_base 7: mod_base = OTHER; note = 2' Fluoro-uridine
  modified_base 8: mod_base = gm
  modified_base 9: mod_base = OTHER; note = 2'-Fluoro-adenosine
  modified_base 10: mod_base = OTHER; note = 2' Fluoro-guanosine
  modified_base 11: mod_base = OTHER; note = 2'-Fluoro-adenosine
  modified_base 12: mod_base = um
  modified_base 13: mod_base = um
  modified_base 14: mod_base = OTHER; note = 2'O-methyl-adenosine
  modified_base 15: mod_base = OTHER; note = 2'O-methyl-adenosine
  modified_base 16: mod_base = um
  modified_base 17: mod_base = cm
  modified_base 18: mod_base = cm
  modified_base 19: mod_base = um
  modified_base 20: mod_base = gm
  modified_base 21: mod_base = OTHER; note = 2'O-methyl-adenosine
  modified_base 1^2: mod_base = OTHER; note = phosphorothioate linkage
  modified_base 2^3: mod_base = OTHER; note = phosphorothioate linkage
gtttgatgagattaatcctga

SEQ ID NO: 568 - RNA, 21 nt, synthetic construct
  source 1..21: mol_type = other RNA
  misc_feature 1..21: note = Description: ZPI siRNA sense strand: ETXS643; corresponding to SEQ ID NO: 248
  modified_base 1: mod_base = um
  modified_base 2: mod_base = gm
  modified_base 3: mod_base = OTHER; note = 2'O-methyl-adenosine
  modified_base 4: mod_base = gm
  modified_base 5: mod_base = OTHER; note = 2'O-methyl-adenosine
  modified_base 6: mod_base = um
  modified_base 7: mod_base = OTHER; note = 2' Fluoro-uridine
  modified_base 8: mod_base = OTHER; note = 2'O-methyl-adenosine
  modified_base 9: mod_base = OTHER; note = 2'-Fluoro-adenosine
  modified_base 10: mod_base = OTHER; note = 2' Fluoro-uridine
  modified_base 11: mod_base = OTHER; note = 2' Fluoro-cytidine
  modified_base 12: mod_base = cm
  modified_base 13: mod_base = um
  modified_base 14: mod_base = gm
  modified_base 15: mod_base = OTHER; note = 2'O-methyl-adenosine
  modified_base 16: mod_base = OTHER; note = 2'O-methyl-adenosine
  modified_base 17: mod_base = OTHER; note = 2'O-methyl-adenosine
  modified_base 18: mod_base = cm
  modified_base 19: mod_base = cm
  modified_base 20: mod_base = OTHER; note = 2'O-methyl-adenosine
  modified_base 21: mod_base = OTHER; note = 2'O-methyl-adenosine
  modified_base 1^2: mod_base = OTHER; note = phosphorothioate linkage
  modified_base 2^3: mod_base = OTHER; note = phosphorothioate linkage
tgagattaatcctgaaaccaa

SEQ ID NO: 569 - RNA, 21 nt, synthetic construct
  source 1..21: mol_type = other RNA
  misc_feature 1..21: note = Description: ZPI siRNA sense strand: ETXS645; corresponding to SEQ ID NO: 249
  modified_base 1: mod_base = um
  modified_base 2: mod_base = gm
  modified_base 3: mod_base = OTHER; note = 2'O-methyl-adenosine
  modified_base 4: mod_base = um
  modified_base 5: mod_base = gm
  modified_base 6: mod_base = OTHER; note = 2'O-methyl-adenosine
  modified_base 7: mod_base = OTHER; note = 2' Fluoro-guanosine
  modified_base 8: mod_base = OTHER; note = 2'O-methyl-adenosine
  modified_base 9: mod_base = OTHER; note = 2' Fluoro-uridine
  modified_base 10: mod_base = OTHER; note = 2' Fluoro-uridine
  modified_base 11: mod_base = OTHER; note = 2'-Fluoro-adenosine
  modified_base 12: mod_base = OTHER; note = 2'O-methyl-adenosine
  modified_base 13: mod_base = um
  modified_base 14: mod_base = cm
  modified_base 15: mod_base = cm
  modified_base 16: mod_base = um
  modified_base 17: mod_base = gm
  modified_base 18: mod_base = OTHER; note = 2'O-methyl-adenosine
  modified_base 19: mod_base = OTHER; note = 2'O-methyl-adenosine
  modified_base 20: mod_base = OTHER; note = 2'O-methyl-adenosine
  modified_base 21: mod_base = cm
  modified_base 1^2: mod_base = OTHER; note = phosphorothioate linkage
  modified_base 2^3: mod_base = OTHER; note = phosphorothioate linkage
tgatgagattaatcctgaaac

SEQ ID NO: 570 - RNA, 21 nt, synthetic construct
  source 1..21: mol_type = other RNA
  misc_feature 1..21: note = Description: ZPI siRNA sense strand: ETXS647; corresponding to SEQ ID NO: 250
  modified_base 1: mod_base = OTHER; note = 2'O-methyl-adenosine
  modified_base 2: mod_base = um
  modified_base 3: mod_base = gm
  modified_base 4: mod_base = OTHER; note = 2'O-methyl-adenosine
  modified_base 5: mod_base = gm
  modified_base 6: mod_base = OTHER; note = 2'O-methyl-adenosine
  modified_base 7: mod_base = OTHER; note = 2' Fluoro-uridine
  modified_base 8: mod_base = um
  modified_base 9: mod_base = OTHER; note = 2'-Fluoro-adenosine
  modified_base 10: mod_base = OTHER; note = 2'-Fluoro-adenosine
  modified_base 11: mod_base = OTHER; note = 2' Fluoro-uridine
  modified_base 12: mod_base = cm
  modified_base 13: mod_base = cm
  modified_base 14: mod_base = um
  modified_base 15: mod_base = gm
  modified_base 16: mod_base = OTHER; note = 2'O-methyl-adenosine
  modified_base 17: mod_base = OTHER; note = 2'O-methyl-adenosine
  modified_base 18: mod_base = OTHER; note = 2'O-methyl-adenosine
  modified_base 19: mod_base = cm
  modified_base 20: mod_base = cm
  modified_base 21: mod_base = OTHER; note = 2'O-methyl-adenosine
  modified_base 1^2: mod_base = OTHER; note = phosphorothioate linkage
  modified_base 2^3: mod_base = OTHER; note = phosphorothioate linkage
atgagattaatcctgaaacca

SEQ ID NO: 571 - RNA, 21 nt, synthetic construct
  source 1..21: mol_type = other RNA
  misc_feature 1..21: note = Description: ZPI siRNA sense strand: ETXS649; corresponding to SEQ ID NO: 251
  modified_base 1: mod_base = gm
  modified_base 2: mod_base = OTHER; note = 2'O-methyl-adenosine
  modified_base 3: mod_base = um
  modified_base 4: mod_base = gm
  modified_base 5: mod_base = OTHER; note = 2'O-methyl-adenosine
  modified_base 6: mod_base = gm
  modified_base 7: mod_base = OTHER; note = 2'-Fluoro-adenosine
  modified_base 8: mod_base = um
  modified_base 9: mod_base = OTHER; note = 2' Fluoro-uridine
  modified_base 10: mod_base = OTHER; note = 2'-Fluoro-adenosine
  modified_base 11: mod_base = OTHER; note = 2'-Fluoro-adenosine
  modified_base 12: mod_base = um
  modified_base 13: mod_base = cm
  modified_base 14: mod_base = cm
  modified_base 15: mod_base = um
  modified_base 16: mod_base = gm
  modified_base 17: mod_base = OTHER; note = 2'O-methyl-adenosine
  modified_base 18: mod_base = OTHER; note = 2'O-methyl-adenosine
  modified_base 19: mod_base = OTHER; note = 2'O-methyl-adenosine
  modified_base 20: mod_base = cm
  modified_base 21: mod_base = cm
  modified_base 1^2: mod_base = OTHER; note = phosphorothioate linkage
  modified_base 2^3: mod_base = OTHER; note = phosphorothioate linkage
gatgagattaatcctgaaacc

SEQ ID NO: 572 - RNA, 21 nt, synthetic construct
  source 1..21: mol_type = other RNA
  misc_feature 1..21: note = Description: ZPI siRNA sense strand: ETXS651; corresponding to SEQ ID NO: 252
  modified_base 1: mod_base = cm
  modified_base 2: mod_base = um
  modified_base 3: mod_base = gm
  modified_base 4: mod_base = um
  modified_base 5: mod_base = um
  modified_base 6: mod_base = um
  modified_base 7: mod_base = OTHER; note = 2' Fluoro-guanosine
  modified_base 8: mod_base = OTHER; note = 2'O-methyl-adenosine
  modified_base 9: mod_base = OTHER; note = 2' Fluoro-uridine
  modified_base 10: mod_base = OTHER; note = 2' Fluoro-guanosine
  modified_base 11: mod_base = OTHER; note = 2'-Fluoro-adenosine
  modified_base 12: mod_base = gm
  modified_base 13: mod_base = OTHER; note = 2'O-methyl-adenosine
  modified_base 14: mod_base = um
  modified_base 15: mod_base = um
  modified_base 16: mod_base = OTHER; note = 2'O-methyl-adenosine
  modified_base 17: mod_base = OTHER; note = 2'O-methyl-adenosine
  modified_base 18: mod_base = um
  modified_base 19: mod_base = cm
  modified_base 20: mod_base = cm
  modified_base 21: mod_base = um
  modified_base 1^2: mod_base = OTHER; note = phosphorothioate linkage
  modified_base 2^3: mod_base = OTHER; note = phosphorothioate linkage
ctgtttgatgagattaatcct

SEQ ID NO: 573 - RNA, 21 nt, synthetic construct
  source 1..21: mol_type = other RNA
  misc_feature 1..21: note = Description: ZPI siRNA sense strand: ETXS653; corresponding to SEQ ID NO: 253
  modified_base 1: mod_base = um
  modified_base 2: mod_base = um
  modified_base 3: mod_base = um
  modified_base 4: mod_base = um
  modified_base 5: mod_base = gm
  modified_base 6: mod_base = cm
  modified_base 7: mod_base = OTHER; note = 2' Fluoro-cytidine
  modified_base 8: mod_base = um
  modified_base 9: mod_base = OTHER; note = 2' Fluoro-uridine
  modified_base 10: mod_base = OTHER; note = 2' Fluoro-cytidine
  modified_base 11: mod_base = OTHER; note = 2'-Fluoro-adenosine
  modified_base 12: mod_base = um
  modified_base 13: mod_base = cm
  modified_base 14: mod_base = cm
  modified_base 15: mod_base = OTHER; note = 2'O-methyl-adenosine
  modified_base 16: mod_base = cm
  modified_base 17: mod_base = OTHER; note = 2'O-methyl-adenosine
  modified_base 18: mod_base = OTHER; note = 2'O-methyl-adenosine
  modified_base 19: mod_base = gm
  modified_base 20: mod_base = gm
  modified_base 21: mod_base = OTHER; note = 2'O-methyl-adenosine
  modified_base 1^2: mod_base = OTHER; note = phosphorothioate linkage
  modified_base 2^3: mod_base = OTHER; note = phosphorothioate linkage
ttttgccttcatccacaagga

SEQ ID NO: 574 - RNA, 21 nt, synthetic construct
  source 1..21: mol_type = other RNA
  misc_feature 1..21: note = Description: ZPI siRNA sense strand: ETXS655; corresponding to SEQ ID NO: 254
  modified_base 1: mod_base = cm
  modified_base 2: mod_base = gm
  modified_base 3: mod_base = OTHER; note = 2'O-methyl-adenosine
  modified_base 4: mod_base = OTHER; note = 2'O-methyl-adenosine
  modified_base 5: mod_base = OTHER; note = 2'O-methyl-adenosine
  modified_base 6: mod_base = gm
  modified_base 7: mod_base = OTHER; note = 2'-Fluoro-adenosine
  modified_base 8: mod_base = um
  modified_base 9: mod_base = OTHER; note = 2' Fluoro-cytidine
  modified_base 10: mod_base = OTHER; note = 2' Fluoro-uridine
  modified_base 11: mod_base = OTHER; note = 2' Fluoro-cytidine
  modified_base 12: mod_base = cm
  modified_base 13: mod_base = OTHER; note = 2'O-methyl-adenosine
  modified_base 14: mod_base = um
  modified_base 15: mod_base = gm
  modified_base 16: mod_base = OTHER; note = 2'O-methyl-adenosine
  modified_base 17: mod_base = gm
  modified_base 18: mod_base = gm
  modified_base 19: mod_base = cm
  modified_base 20: mod_base = OTHER; note = 2'O-methyl-adenosine
  modified_base 21: mod_base = cm
  modified_base 1^2: mod_base = OTHER; note = phosphorothioate linkage
  modified_base 2^3: mod_base = OTHER; note = phosphorothioate linkage
cgaaagatctccatgaggcac

SEQ ID NO: 575 - RNA, 21 nt, synthetic construct
  source 1..21: mol_type = other RNA
  misc_feature 1..21: note = Description: ZPI siRNA sense strand: ETXS657; corresponding to SEQ ID NO: 255
  modified_base 1: mod_base = um
  modified_base 2: mod_base = gm
  modified_base 3: mod_base = cm
  modified_base 4: mod_base = um
  modified_base 5: mod_base = gm
  modified_base 6: mod_base = gm
  modified_base 7: mod_base = OTHER; note = 2' Fluoro-uridine
  modified_base 8: mod_base = gm
  modified_base 9: mod_base = OTHER; note = 2' Fluoro-guanosine
  modified_base 10: mod_base = OTHER; note = 2' Fluoro-uridine
  modified_base 11: mod_base = OTHER; note = 2' Fluoro-cytidine
  modified_base 12: mod_base = cm
  modified_base 13: mod_base = um
  modified_base 14: mod_base = cm
  modified_base 15: mod_base = OTHER; note = 2'O-methyl-adenosine
  modified_base 16: mod_base = um
  modified_base 17: mod_base = gm
  modified_base 18: mod_base = gm
  modified_base 19: mod_base = OTHER; note = 2'O-methyl-adenosine
  modified_base 20: mod_base = gm
  modified_base 21: mod_base = OTHER; note = 2'O-methyl-adenosine
  modified_base 1^2: mod_base = OTHER; note = phosphorothioate linkage
  modified_base 2^3: mod_base = OTHER; note = phosphorothioate linkage
tgctggtggtcctcatggaga

SEQ ID NO: 576 - RNA, 21 nt, synthetic construct
  source 1..21: mol_type = other RNA
  misc_feature 1..21: note = Description: ZPI siRNA sense strand: ETXS659; corresponding to SEQ ID NO: 256
  modified_base 1: mod_base = cm
  modified_base 2: mod_base = cm
  modified_base 3: mod_base = um
  modified_base 4: mod_base = um
  modified_base 5: mod_base = cm
  modified_base 6: mod_base = OTHER; note = 2'O-methyl-adenosine
  modified_base 7: mod_base = OTHER; note = 2' Fluoro-uridine
  modified_base 8: mod_base = cm
  modified_base 9: mod_base = OTHER; note = 2' Fluoro-cytidine
  modified_base 10: mod_base = OTHER; note = 2'-Fluoro-adenosine
  modified_base 11: mod_base = OTHER; note = 2' Fluoro-cytidine
  modified_base 12: mod_base = OTHER; note = 2'O-methyl-adenosine
  modified_base 13: mod_base = OTHER; note = 2'O-methyl-adenosine
  modified_base 14: mod_base = gm
  modified_base 15: mod_base = gm
  modified_base 16: mod_base = OTHER; note = 2'O-methyl-adenosine
  modified_base 17: mod_base = um
  modified_base 18: mod_base = um
  modified_base 19: mod_base = um
  modified_base 20: mod_base = um
  modified_base 21: mod_base = gm
  modified_base 1^2: mod_base = OTHER; note = phosphorothioate linkage
  modified_base 2^3: mod_base = OTHER; note = phosphorothioate linkage
ccttcatccacaaggattttg

SEQ ID NO: 577 - RNA, 21 nt, synthetic construct
  source 1..21: mol_type = other RNA
  misc_feature 1..21: note = Description: ZPI siRNA sense strand: ETXS661; corresponding to SEQ ID NO: 257
  modified_base 1: mod_base = gm
  modified_base 2: mod_base = OTHER; note = 2'O-methyl-adenosine
  modified_base 3: mod_base = OTHER; note = 2'O-methyl-adenosine
  modified_base 4: mod_base = OTHER; note = 2'O-methyl-adenosine
  modified_base 5: mod_base = gm
  modified_base 6: mod_base = OTHER; note = 2'O-methyl-adenosine
  modified_base 7: mod_base = OTHER; note = 2' Fluoro-uridine
  modified_base 8: mod_base = cm
  modified_base 9: mod_base = OTHER; note = 2' Fluoro-uridine
  modified_base 10: mod_base = OTHER; note = 2' Fluoro-cytidine
  modified_base 11: mod_base = OTHER; note = 2' Fluoro-cytidine
  modified_base 12: mod_base = OTHER; note = 2'O-methyl-adenosine
  modified_base 13: mod_base = um
  modified_base 14: mod_base = gm
  modified_base 15: mod_base = OTHER; note = 2'O-methyl-adenosine
  modified_base 16: mod_base = gm
  modified_base 17: mod_base = gm
  modified_base 18: mod_base = cm
  modified_base 19: mod_base = OTHER; note = 2'O-methyl-adenosine
  modified_base 20: mod_base = cm
  modified_base 21: mod_base = gm
  modified_base 1^2: mod_base = OTHER; note = phosphorothioate linkage
  modified_base 2^3: mod_base = OTHER; note = phosphorothioate linkage
gaaagatctccatgaggcacg

SEQ ID NO: 578 - RNA, 21 nt, synthetic construct
  source 1..21: mol_type = other RNA
  misc_feature 1..21: note = Description: ZPI siRNA sense strand: ETXS663; corresponding to SEQ ID NO: 258
  modified_base 1: mod_base = um
  modified_base 2: mod_base = um
  modified_base 3: mod_base = cm
  modified_base 4: mod_base = OTHER; note = 2'O-methyl-adenosine
  modified_base 5: mod_base = um
  modified_base 6: mod_base = cm
  modified_base 7: mod_base = OTHER; note = 2' Fluoro-cytidine
  modified_base 8: mod_base = OTHER; note = 2'O-methyl-adenosine
  modified_base 9: mod_base = OTHER; note = 2' Fluoro-cytidine
  modified_base 10: mod_base = OTHER; note = 2'-Fluoro-adenosine
  modified_base 11: mod_base = OTHER; note = 2'-Fluoro-adenosine
  modified_base 12: mod_base = gm
  modified_base 13: mod_base = gm
  modified_base 14: mod_base = OTHER; note = 2'O-methyl-adenosine
  modified_base 15: mod_base = um
  modified_base 16: mod_base = um
  modified_base 17: mod_base = um
  modified_base 18: mod_base = um
  modified_base 19: mod_base = gm
  modified_base 20: mod_base = OTHER; note = 2'O-methyl-adenosine
  modified_base 21: mod_base = um
  modified_base 1^2: mod_base = OTHER; note = phosphorothioate linkage
  modified_base 2^3: mod_base = OTHER; note = phosphorothioate linkage
ttcatccacaaggattttgat

SEQ ID NO: 579 - RNA, 21 nt, synthetic construct
  source 1..21: mol_type = other RNA
  misc_feature 1..21: note = Description: ZPI siRNA sense strand: ETXS665; corresponding to SEQ ID NO: 259
  modified_base 1: mod_base = um
  modified_base 2: mod_base = um
  modified_base 3: mod_base = um
  modified_base 4: mod_base = gm
  modified_base 5: mod_base = OTHER; note = 2'O-methyl-adenosine
  modified_base 6: mod_base = um
  modified_base 7: mod_base = OTHER; note = 2' Fluoro-guanosine
  modified_base 8: mod_base = OTHER; note = 2'O-methyl-adenosine
  modified_base 9: mod_base = OTHER; note = 2' Fluoro-guanosine
  modified_base 10: mod_base = OTHER; note = 2'-Fluoro-adenosine
  modified_base 11: mod_base = OTHER; note = 2' Fluoro-uridine
  modified_base 12: mod_base = um
  modified_base 13: mod_base = OTHER; note = 2'O-methyl-adenosine
  modified_base 14: mod_base = OTHER; note = 2'O-methyl-adenosine
  modified_base 15: mod_base = um
  modified_base 16: mod_base = cm
  modified_base 17: mod_base = cm
  modified_base 18: mod_base = um
  modified_base 19: mod_base = gm
  modified_base 20: mod_base = OTHER; note = 2'O-methyl-adenosine
  modified_base 21: mod_base = OTHER; note = 2'O-methyl-adenosine
  modified_base 1^2: mod_base = OTHER; note = phosphorothioate linkage
  modified_base 2^3: mod_base = OTHER; note = phosphorothioate linkage
tttgatgagattaatcctgaa

SEQ ID NO: 580 - RNA, 21 nt, synthetic construct
  source 1..21: mol_type = other RNA
  misc_feature 1..21: note = Description: ZPI siRNA sense strand: ETXS667; corresponding to SEQ ID NO: 260
  modified_base 1: mod_base = um
  modified_base 2: mod_base = um
  modified_base 3: mod_base = gm
  modified_base 4: mod_base = cm
  modified_base 5: mod_base = cm
  modified_base 6: mod_base = um
  modified_base 7: mod_base = OTHER; note = 2' Fluoro-uridine
  modified_base 8: mod_base = cm
  modified_base 9: mod_base = OTHER; note = 2'-Fluoro-adenosine
  modified_base 10: mod_base = OTHER; note = 2' Fluoro-uridine
  modified_base 11: mod_base = OTHER; note = 2' Fluoro-cytidine
  modified_base 12: mod_base = cm
  modified_base 13: mod_base = OTHER; note = 2'O-methyl-adenosine
  modified_base 14: mod_base = cm
  modified_base 15: mod_base = OTHER; note = 2'O-methyl-adenosine
  modified_base 16: mod_base = OTHER; note = 2'O-methyl-adenosine
  modified_base 17: mod_base = gm
  modified_base 18: mod_base = gm
  modified_base 19: mod_base = OTHER; note = 2'O-methyl-adenosine
  modified_base 20: mod_base = um
  modified_base 21: mod_base = um
  modified_base 1^2: mod_base = OTHER; note = phosphorothioate linkage
  modified_base 2^3: mod_base = OTHER; note = phosphorothioate linkage
ttgccttcatccacaaggatt

SEQ ID NO: 581 - RNA, 21 nt, synthetic construct
  source 1..21: mol_type = other RNA
  misc_feature 1..21: note = Description: ZPI siRNA sense strand: ETXS669; corresponding to SEQ ID NO: 261
  modified_base 1: mod_base = gm
  modified_base 2: mod_base = OTHER; note = 2'O-methyl-adenosine
  modified_base 3: mod_base = um
  modified_base 4: mod_base = cm
  modified_base 5: mod_base = um
  modified_base 6: mod_base = cm
  modified_base 7: mod_base = OTHER; note = 2' Fluoro-cytidine
  modified_base 8: mod_base = OTHER; note = 2'O-methyl-adenosine
  modified_base 9: mod_base = OTHER; note = 2' Fluoro-uridine
  modified_base 10: mod_base = OTHER; note = 2' Fluoro-guanosine
  modified_base 11: mod_base = OTHER; note = 2'-Fluoro-adenosine
  modified_base 12: mod_base = gm
  modified_base 13: mod_base = gm
  modified_base 14: mod_base = cm
  modified_base 15: mod_base = OTHER; note = 2'O-methyl-adenosine
  modified_base 16: mod_base = cm
  modified_base 17: mod_base = gm
  modified_base 18: mod_base = OTHER; note = 2'O-methyl-adenosine
  modified_base 19: mod_base = um
  modified_base 20: mod_base = gm
  modified_base 21: mod_base = gm
  modified_base 1^2: mod_base = OTHER; note = phosphorothioate linkage
  modified_base 2^3: mod_base = OTHER; note = phosphorothioate linkage
gatctccatgaggcacgatgg

SEQ ID NO: 582 - RNA, 21 nt, synthetic construct
  source 1..21: mol_type = other RNA
  misc_feature 1..21: note = Description: ZPI siRNA sense strand: ETXS671; corresponding to SEQ ID NO: 262
  modified_base 1: mod_base = cm
  modified_base 2: mod_base = OTHER; note = 2'O-methyl-adenosine
  modified_base 3: mod_base = um
  modified_base 4: mod_base = gm
  modified_base 5: mod_base = cm
  modified_base 6: mod_base = um
  modified_base 7: mod_base = OTHER; note = 2' Fluoro-guanosine
  modified_base 8: mod_base = gm
  modified_base 9: mod_base = OTHER; note = 2' Fluoro-uridine
  modified_base 10: mod_base = OTHER; note = 2' Fluoro-guanosine
  modified_base 11: mod_base = OTHER; note = 2' Fluoro-guanosine
  modified_base 12: mod_base = um
  modified_base 13: mod_base = cm
  modified_base 14: mod_base = cm
  modified_base 15: mod_base = um
  modified_base 16: mod_base = cm
  modified_base 17: mod_base = OTHER; note = 2'O-methyl-adenosine
  modified_base 18: mod_base = um
  modified_base 19: mod_base = gm
  modified_base 20: mod_base = gm
  modified_base 21: mod_base = OTHER; note = 2'O-methyl-adenosine
  modified_base 1^2: mod_base = OTHER; note = phosphorothioate linkage
  modified_base 2^3: mod_base = OTHER; note = phosphorothioate linkage
catgctggtggtcctcatgga

SEQ ID NO: 583 - RNA, 21 nt, synthetic construct
  source 1..21: mol_type = other RNA
  misc_feature 1..21: note = Description: ZPI siRNA sense strand: ETXS673; corresponding to SEQ ID NO: 263
  modified_base 1: mod_base = um
  modified_base 2: mod_base = um
  modified_base 3: mod_base = um
  modified_base 4: mod_base = gm
  modified_base 5: mod_base = cm
  modified_base 6: mod_base = cm
  modified_base 7: mod_base = OTHER; note = 2' Fluoro-uridine
  modified_base 8: mod_base = um
  modified_base 9: mod_base = OTHER; note = 2' Fluoro-cytidine
  modified_base 10: mod_base = OTHER; note = 2'-Fluoro-adenosine
  modified_base 11: mod_base = OTHER; note = 2' Fluoro-uridine
  modified_base 12: mod_base = cm
  modified_base 13: mod_base = cm
  modified_base 14: mod_base = OTHER; note = 2'O-methyl-adenosine
  modified_base 15: mod_base = cm
  modified_base 16: mod_base = OTHER; note = 2'O-methyl-adenosine
  modified_base 17: mod_base = OTHER; note = 2'O-methyl-adenosine
  modified_base 18: mod_base = gm
  modified_base 19: mod_base = gm
  modified_base 20: mod_base = OTHER; note = 2'O-methyl-adenosine
  modified_base 21: mod_base = um
  modified_base 1^2: mod_base = OTHER; note = phosphorothioate linkage
  modified_base 2^3: mod_base = OTHER; note = phosphorothioate linkage
tttgccttcatccacaaggat

SEQ ID NO: 584 - RNA, 21 nt, synthetic construct
  source 1..21: mol_type = other RNA
  misc_feature 1..21: note = Description: ZPI siRNA sense strand: ETXS675; corresponding to SEQ ID NO: 264
  modified_base 1: mod_base = gm
  modified_base 2: mod_base = cm
  modified_base 3: mod_base = cm
  modified_base 4: mod_base = um
  modified_base 5: mod_base = um
  modified_base 6: mod_base = cm
  modified_base 7: mod_base = OTHER; note = 2'-Fluoro-adenosine
  modified_base 8: mod_base = um
  modified_base 9: mod_base = OTHER; note = 2' Fluoro-cytidine
  modified_base 10: mod_base = OTHER; note = 2' Fluoro-cytidine
  modified_base 11: mod_base = OTHER; note = 2'-Fluoro-adenosine
  modified_base 12: mod_base = cm
  modified_base 13: mod_base = OTHER; note = 2'O-methyl-adenosine
  modified_base 14: mod_base = OTHER; note = 2'O-methyl-adenosine
  modified_base 15: mod_base = gm
  modified_base 16: mod_base = gm
  modified_base 17: mod_base = OTHER; note = 2'O-methyl-adenosine
  modified_base 18: mod_base = um
  modified_base 19: mod_base = um
  modified_base 20: mod_base = um
  modified_base 21: mod_base = um
  modified_base 1^2: mod_base = OTHER; note = phosphorothioate linkage
  modified_base 2^3: mod_base = OTHER; note = phosphorothioate linkage
gccttcatccacaaggatttt

SEQ ID NO: 585 - RNA, 21 nt, synthetic construct
  source 1..21: mol_type = other RNA
  misc_feature 1..21: note = Description: ZPI siRNA sense strand: ETXS677; corresponding to SEQ ID NO: 265
  modified_base 1: mod_base = um
  modified_base 2: mod_base = OTHER; note = 2'O-methyl-adenosine
  modified_base 3: mod_base = cm
  modified_base 4: mod_base = cm
  modified_base 5: mod_base = OTHER; note = 2'O-methyl-adenosine
  modified_base 6: mod_base = OTHER; note = 2'O-methyl-adenosine
  modified_base 7: mod_base = OTHER; note = 2' Fluoro-guanosine
  modified_base 8: mod_base = gm
  modified_base 9: mod_base = OTHER; note = 2'-Fluoro-adenosine
  modified_base 10: mod_base = OTHER; note = 2'-Fluoro-adenosine
  modified_base 11: mod_base = OTHER; note = 2'-Fluoro-adenosine
  modified_base 12: mod_base = um
  modified_base 13: mod_base = gm
  modified_base 14: mod_base = cm
  modified_base 15: mod_base = cm
  modified_base 16: mod_base = OTHER; note = 2'O-methyl-adenosine
  modified_base 17: mod_base = cm
  modified_base 18: mod_base = cm
  modified_base 19: mod_base = OTHER; note = 2'O-methyl-adenosine
  modified_base 20: mod_base = um
  modified_base 21: mod_base = gm
  modified_base 1^2: mod_base = OTHER; note = phosphorothioate linkage
  modified_base 2^3: mod_base = OTHER; note = phosphorothioate linkage
taccaaggaaatgccaccatg

SEQ ID NO: 586 - RNA, 21 nt, synthetic construct
  source 1..21: mol_type = other RNA
  misc_feature 1..21: note = Description: ZPI siRNA sense strand: ETXS679; corresponding to SEQ ID NO: 266
  modified_base 1: mod_base = um
  modified_base 2: mod_base = um
  modified_base 3: mod_base = gm
  modified_base 4: mod_base = OTHER; note = 2'O-methyl-adenosine
  modified_base 5: mod_base = um
  modified_base 6: mod_base = gm
  modified_base 7: mod_base = OTHER; note = 2'-Fluoro-adenosine
  modified_base 8: mod_base = gm
  modified_base 9: mod_base = OTHER; note = 2'-Fluoro-adenosine
  modified_base 10: mod_base = OTHER; note = 2' Fluoro-uridine
  modified_base 11: mod_base = OTHER; note = 2' Fluoro-uridine
  modified_base 12: mod_base = OTHER; note = 2'O-methyl-adenosine
  modified_base 13: mod_base = OTHER; note = 2'O-methyl-adenosine
  modified_base 14: mod_base = um
  modified_base 15: mod_base = cm
  modified_base 16: mod_base = cm
  modified_base 17: mod_base = um
  modified_base 18: mod_base = gm
  modified_base 19: mod_base = OTHER; note = 2'O-methyl-adenosine
  modified_base 20: mod_base = OTHER; note = 2'O-methyl-adenosine
  modified_base 21: mod_base = OTHER; note = 2'O-methyl-adenosine
  modified_base 1^2: mod_base = OTHER; note = phosphorothioate linkage
  modified_base 2^3: mod_base = OTHER; note = phosphorothioate linkage
ttgatgagattaatcctgaaa

SEQ ID NO: 587 - RNA, 21 nt, synthetic construct
  source 1..21: mol_type = other RNA
  misc_feature 1..21: note = Description: ZPI siRNA sense strand: ETXS681; corresponding to SEQ ID NO: 267
  modified_base 1: mod_base = cm
  modified_base 2: mod_base = um
  modified_base 3: mod_base = um
  modified_base 4: mod_base = cm
  modified_base 5: mod_base = OTHER; note = 2'O-methyl-adenosine
  modified_base 6: mod_base = um
  modified_base 7: mod_base = OTHER; note = 2' Fluoro-cytidine
  modified_base 8: mod_base = cm
  modified_base 9: mod_base = OTHER; note = 2'-Fluoro-adenosine
  modified_base 10: mod_base = OTHER; note = 2' Fluoro-cytidine
  modified_base 11: mod_base = OTHER; note = 2'-Fluoro-adenosine
  modified_base 12: mod_base = OTHER; note = 2'O-methyl-adenosine
  modified_base 13: mod_base = gm
  modified_base 14: mod_base = gm
  modified_base 15: mod_base = OTHER; note = 2'O-methyl-adenosine
  modified_base 16: mod_base = um
  modified_base 17: mod_base = um
  modified_base 18: mod_base = um
  modified_base 19: mod_base = um
  modified_base 20: mod_base = gm
  modified_base 21: mod_base = OTHER; note = 2'O-methyl-adenosine
  modified_base 1^2: mod_base = OTHER; note = phosphorothioate linkage
  modified_base 2^3: mod_base = OTHER; note = phosphorothioate linkage
cttcatccacaaggattttga

SEQ ID NO: 588 - RNA, 21 nt, synthetic construct
  source 1..21: mol_type = other RNA
  misc_feature 1..21: note = Description: ZPI siRNA sense strand: ETXS683; corresponding to SEQ ID NO: 268
  modified_base 1: mod_base = OTHER; note = 2'O-methyl-adenosine
  modified_base 2: mod_base = OTHER; note = 2'O-methyl-adenosine
  modified_base 3: mod_base = OTHER; note = 2'O-methyl-adenosine
  modified_base 4: mod_base = gm
  modified_base 5: mod_base = OTHER; note = 2'O-methyl-adenosine
  modified_base 6: mod_base = um
  modified_base 7: mod_base = OTHER; note = 2' Fluoro-cytidine
  modified_base 8: mod_base = um
  modified_base 9: mod_base = OTHER; note = 2' Fluoro-cytidine
  modified_base 10: mod_base = OTHER; note = 2' Fluoro-cytidine
  modified_base 11: mod_base = OTHER; note = 2'-Fluoro-adenosine
  modified_base 12: mod_base = um
  modified_base 13: mod_base = gm
  modified_base 14: mod_base = OTHER; note = 2'O-methyl-adenosine
  modified_base 15: mod_base = gm
  modified_base 16: mod_base = gm
  modified_base 17: mod_base = cm
  modified_base 18: mod_base = OTHER; note = 2'O-methyl-adenosine
  modified_base 19: mod_base = cm
  modified_base 20: mod_base = gm
  modified_base 21: mod_base = OTHER; note = 2'O-methyl-adenosine
  modified_base 1^2: mod_base = OTHER; note = phosphorothioate linkage
  modified_base 2^3: mod_base = OTHER; note = phosphorothioate linkage
aaagatctccatgaggcacga

SEQ ID NO: 589 - RNA, 21 nt, synthetic construct
  source 1..21: mol_type = other RNA
  misc_feature 1..21: note = Description: ZPI siRNA sense strand: ETXS685; corresponding to SEQ ID NO: 269
  modified_base 1: mod_base = um
  modified_base 2: mod_base = gm
  modified_base 3: mod_base = um
  modified_base 4: mod_base = um
  modified_base 5: mod_base = um
  modified_base 6: mod_base = gm
  modified_base 7: mod_base = OTHER; note = 2'-Fluoro-adenosine
  modified_base 8: mod_base = um
  modified_base 9: mod_base = OTHER; note = 2' Fluoro-guanosine
  modified_base 10: mod_base = OTHER; note = 2'-Fluoro-adenosine
  modified_base 11: mod_base = OTHER; note = 2' Fluoro-guanosine
  modified_base 12: mod_base = OTHER; note = 2'O-methyl-adenosine
  modified_base 13: mod_base = um
  modified_base 14: mod_base = um
  modified_base 15: mod_base = OTHER; note = 2'O-methyl-adenosine
  modified_base 16: mod_base = OTHER; note = 2'O-methyl-adenosine
  modified_base 17: mod_base = um
  modified_base 18: mod_base = cm
  modified_base 19: mod_base = cm
  modified_base 20: mod_base = um
  modified_base 21: mod_base = gm
  modified_base 1^2: mod_base = OTHER; note = phosphorothioate linkage
  modified_base 2^3: mod_base = OTHER; note = phosphorothioate linkage
tgtttgatgagattaatcctg

SEQ ID NO: 590 - RNA, 21 nt, synthetic construct
  source 1..21: mol_type = other RNA
  misc_feature 1..21: note = Description: ZPI siRNA sense strand: ETXS687; corresponding to SEQ ID NO: 270
  modified_base 1: mod_base = OTHER; note = 2'O-methyl-adenosine
  modified_base 2: mod_base = um
  modified_base 3: mod_base = gm
  modified_base 4: mod_base = cm
  modified_base 5: mod_base = um
  modified_base 6: mod_base = gm
  modified_base 7: mod_base = OTHER; note = 2' Fluoro-guanosine
  modified_base 8: mod_base = um
  modified_base 9: mod_base = OTHER; note = 2' Fluoro-guanosine
  modified_base 10: mod_base = OTHER; note = 2' Fluoro-guanosine
  modified_base 11: mod_base = OTHER; note = 2' Fluoro-uridine
  modified_base 12: mod_base = cm
  modified_base 13: mod_base = cm
  modified_base 14: mod_base = um
  modified_base 15: mod_base = cm
  modified_base 16: mod_base = OTHER; note = 2'O-methyl-adenosine
  modified_base 17: mod_base = um
  modified_base 18: mod_base = gm
  modified_base 19: mod_base = gm
  modified_base 20: mod_base = OTHER; note = 2'O-methyl-adenosine
  modified_base 21: mod_base = gm
  modified_base 1^2: mod_base = OTHER; note = phosphorothioate linkage
  modified_base 2^3: mod_base = OTHER; note = phosphorothioate linkage
atgctggtggtcctcatggag

SEQ ID NO: 591 - RNA, 21 nt, synthetic construct
  source 1..21: mol_type = other RNA
  misc_feature 1..21: note = Description: ZPI siRNA sense strand: ETXS689; corresponding to SEQ ID NO: 271
  modified_base 1: mod_base = gm
  modified_base 2: mod_base = um
  modified_base 3: mod_base = um
  modified_base 4: mod_base = um
  modified_base 5: mod_base = um
  modified_base 6: mod_base = gm
  modified_base 7: mod_base = OTHER; note = 2' Fluoro-cytidine
  modified_base 8: mod_base = cm
  modified_base 9: mod_base = OTHER; note = 2' Fluoro-uridine
  modified_base 10: mod_base = OTHER; note = 2' Fluoro-uridine
  modified_base 11: mod_base = OTHER; note = 2' Fluoro-cytidine
  modified_base 12: mod_base = OTHER; note = 2'O-methyl-adenosine
  modified_base 13: mod_base = um
  modified_base 14: mod_base = cm
  modified_base 15: mod_base = cm
  modified_base 16: mod_base = OTHER; note = 2'O-methyl-adenosine
  modified_base 17: mod_base = cm
  modified_base 18: mod_base = OTHER; note = 2'O-methyl-adenosine
  modified_base 19: mod_base = OTHER; note = 2'O-methyl-adenosine
  modified_base 20: mod_base = gm
  modified_base 21: mod_base = gm
  modified_base 1^2: mod_base = OTHER; note = phosphorothioate linkage
  modified_base 2^3: mod_base = OTHER; note = phosphorothioate linkage
gttttgccttcatccacaagg

SEQ ID NO: 592 - RNA, 21 nt, synthetic construct
  source 1..21: mol_type = other RNA
  misc_feature 1..21: note = Description: ZPI siRNA sense strand: ETXS691; corresponding to SEQ ID NO: 272
  modified_base 1: mod_base = cm
  modified_base 2: mod_base = cm
  modified_base 3: mod_base = OTHER; note = 2'O-methyl-adenosine
  modified_base 4: mod_base = cm
  modified_base 5: mod_base = cm
  modified_base 6: mod_base = OTHER; note = 2'O-methyl-adenosine
  modified_base 7: mod_base = OTHER; note = 2' Fluoro-uridine
  modified_base 8: mod_base = gm
  modified_base 9: mod_base = OTHER; note = 2' Fluoro-cytidine
  modified_base 10: mod_base = OTHER; note = 2' Fluoro-uridine
  modified_base 11: mod_base = OTHER; note = 2' Fluoro-guanosine
  modified_base 12: mod_base = gm
  modified_base 13: mod_base = um
  modified_base 14: mod_base = gm
  modified_base 15: mod_base = gm
  modified_base 16: mod_base = um
  modified_base 17: mod_base = cm
  modified_base 18: mod_base = cm
  modified_base 19: mod_base = um
  modified_base 20: mod_base = cm
  modified_base 21: mod_base = OTHER; note = 2'O-methyl-adenosine
  modified_base 1^2: mod_base = OTHER; note = phosphorothioate linkage
  modified_base 2^3: mod_base = OTHER; note = phosphorothioate linkage
ccaccatgctggtggtcctca

SEQ ID NO: 593 - RNA, 21 nt, synthetic construct
  source 1..21: mol_type = other RNA
  misc_feature 1..21: note = Description: ZPI siRNA sense strand: ETXS693; corresponding to SEQ ID NO: 273
  modified_base 1: mod_base = cm
  modified_base 2: mod_base = OTHER; note = 2'O-methyl-adenosine
  modified_base 3: mod_base = cm
  modified_base 4: mod_base = cm
  modified_base 5: mod_base = OTHER; note = 2'O-methyl-adenosine
  modified_base 6: mod_base = um
  modified_base 7: mod_base = OTHER; note = 2' Fluoro-guanosine
  modified_base 8: mod_base = cm
  modified_base 9: mod_base = OTHER; note = 2' Fluoro-uridine
  modified_base 10: mod_base = OTHER; note = 2' Fluoro-guanosine
  modified_base 11: mod_base = OTHER; note = 2' Fluoro-guanosine
  modified_base 12: mod_base = um
  modified_base 13: mod_base = gm
  modified_base 14: mod_base = gm
  modified_base 15: mod_base = um
  modified_base 16: mod_base = cm
  modified_base 17: mod_base = cm
  modified_base 18: mod_base = um
  modified_base 19: mod_base = cm
  modified_base 20: mod_base = OTHER; note = 2'O-methyl-adenosine
  modified_base 21: mod_base = um
  modified_base 1^2: mod_base = OTHER; note = phosphorothioate linkage
  modified_base 2^3: mod_base = OTHER; note = phosphorothioate linkage
caccatgctggtggtcctcat

SEQ ID NO: 594 - RNA, 21 nt, synthetic construct
  source 1..21: mol_type = other RNA
  misc_feature 1..21: note = Description: ZPI siRNA sense strand: ETXS695; corresponding to SEQ ID NO: 274
  modified_base 1: mod_base = OTHER; note = 2'O-methyl-adenosine
  modified_base 2: mod_base = OTHER; note = 2'O-methyl-adenosine
  modified_base 3: mod_base = gm
  modified_base 4: mod_base = OTHER; note = 2'O-methyl-adenosine
  modified_base 5: mod_base = um
  modified_base 6: mod_base = cm
  modified_base 7: mod_base = OTHER; note = 2' Fluoro-uridine
  modified_base 8: mod_base = cm
  modified_base 9: mod_base = OTHER; note = 2' Fluoro-cytidine
  modified_base 10: mod_base = OTHER; note = 2'-Fluoro-adenosine
  modified_base 11: mod_base = OTHER; note = 2' Fluoro-uridine
  modified_base 12: mod_base = gm
  modified_base 13: mod_base = OTHER; note = 2'O-methyl-adenosine
  modified_base 14: mod_base = gm
  modified_base 15: mod_base = gm
  modified_base 16: mod_base = cm
  modified_base 17: mod_base = OTHER; note = 2'O-methyl-adenosine
  modified_base 18: mod_base = cm
  modified_base 19: mod_base = gm
  modified_base 20: mod_base = OTHER; note = 2'O-methyl-adenosine
  modified_base 21: mod_base = um
  modified_base 1^2: mod_base = OTHER; note = phosphorothioate linkage
  modified_base 2^3: mod_base = OTHER; note = phosphorothioate linkage
aagatctccatgaggcacgat

SEQ ID NO: 595 - RNA, 21 nt, synthetic construct
  source 1..21: mol_type = other RNA
  misc_feature 1..21: note = Description: ZPI siRNA sense strand: ETXS697; corresponding to SEQ ID NO: 275
  modified_base 1: mod_base = OTHER; note = 2'O-methyl-adenosine
  modified_base 2: mod_base = gm
  modified_base 3: mod_base = um
  modified_base 4: mod_base = um
  modified_base 5: mod_base = um
  modified_base 6: mod_base = um
  modified_base 7: mod_base = OTHER; note = 2' Fluoro-guanosine
  modified_base 8: mod_base = cm
  modified_base 9: mod_base = OTHER; note = 2' Fluoro-cytidine
  modified_base 10: mod_base = OTHER; note = 2' Fluoro-uridine
  modified_base 11: mod_base = OTHER; note = 2' Fluoro-uridine
  modified_base 12: mod_base = cm
  modified_base 13: mod_base = OTHER; note = 2'O-methyl-adenosine
  modified_base 14: mod_base = um
  modified_base 15: mod_base = cm
  modified_base 16: mod_base = cm
  modified_base 17: mod_base = OTHER; note = 2'O-methyl-adenosine
  modified_base 18: mod_base = cm
  modified_base 19: mod_base = OTHER; note = 2'O-methyl-adenosine
  modified_base 20: mod_base = OTHER; note = 2'O-methyl-adenosine
  modified_base 21: mod_base = gm
  modified_base 1^2: mod_base = OTHER; note = phosphorothioate linkage
  modified_base 2^3: mod_base = OTHER; note = phosphorothioate linkage
agttttgccttcatccacaag

SEQ ID NO: 596 - RNA, 21 nt, synthetic construct
  source 1..21: mol_type = other RNA
  misc_feature 1..21: note = Description: ZPI siRNA sense strand: ETXS699; corresponding to SEQ ID NO: 276
  modified_base 1: mod_base = OTHER; note = 2'O-methyl-adenosine
  modified_base 2: mod_base = cm
  modified_base 3: mod_base = cm
  modified_base 4: mod_base = OTHER; note = 2'O-methyl-adenosine
  modified_base 5: mod_base = um
  modified_base 6: mod_base = gm
  modified_base 7: mod_base = OTHER; note = 2' Fluoro-cytidine
  modified_base 8: mod_base = um
  modified_base 9: mod_base = OTHER; note = 2' Fluoro-guanosine
  modified_base 10: mod_base = OTHER; note = 2' Fluoro-guanosine
  modified_base 11: mod_base = OTHER; note = 2' Fluoro-uridine
  modified_base 12: mod_base = gm
  modified_base 13: mod_base = gm
  modified_base 14: mod_base = um
  modified_base 15: mod_base = cm
  modified_base 16: mod_base = cm
  modified_base 17: mod_base = um
  modified_base 18: mod_base = cm
  modified_base 19: mod_base = OTHER; note = 2'O-methyl-adenosine
  modified_base 20: mod_base = um
  modified_base 21: mod_base = gm
  modified_base 1^2: mod_base = OTHER; note = phosphorothioate linkage
  modified_base 2^3: mod_base = OTHER; note = phosphorothioate linkage
accatgctggtggtcctcatg

SEQ ID NO: 597 - RNA, 21 nt, synthetic construct
  source 1..21: mol_type = other RNA
  misc_feature 1..21: note = Description: ZPI siRNA sense strand: ETXS701; corresponding to SEQ ID NO: 277
  modified_base 1: mod_base = OTHER; note = 2'O-methyl-adenosine
  modified_base 2: mod_base = gm
  modified_base 3: mod_base = OTHER; note = 2'O-methyl-adenosine
  modified_base 4: mod_base = um
  modified_base 5: mod_base = cm
  modified_base 6: mod_base = um
  modified_base 7: mod_base = OTHER; note = 2' Fluoro-cytidine
  modified_base 8: mod_base = cm
  modified_base 9: mod_base = OTHER; note = 2'-Fluoro-adenosine
  modified_base 10: mod_base = OTHER; note = 2' Fluoro-uridine
  modified_base 11: mod_base = OTHER; note = 2' Fluoro-guanosine
  modified_base 12: mod_base = OTHER; note = 2'O-methyl-adenosine
  modified_base 13: mod_base = gm
  modified_base 14: mod_base = gm
  modified_base 15: mod_base = cm
  modified_base 16: mod_base = OTHER; note = 2'O-methyl-adenosine
  modified_base 17: mod_base = cm
  modified_base 18: mod_base = gm
  modified_base 19: mod_base = OTHER; note = 2'O-methyl-adenosine
  modified_base 20: mod_base = um
  modified_base 21: mod_base = gm
  modified_base 1^2: mod_base = OTHER; note = phosphorothioate linkage
  modified_base 2^3: mod_base = OTHER; note = phosphorothioate linkage
agatctccatgaggcacgatg

SEQ ID NO: 598 - RNA, 21 nt, synthetic construct
  source 1..21: mol_type = other RNA
  misc_feature 1..21: note = Description: ZPI siRNA sense strand: ETXS703; corresponding to SEQ ID NO: 278
  modified_base 1: mod_base = cm
  modified_base 2: mod_base = cm
  modified_base 3: mod_base = OTHER; note = 2'O-methyl-adenosine
  modified_base 4: mod_base = um
  modified_base 5: mod_base = gm
  modified_base 6: mod_base = cm
  modified_base 7: mod_base = OTHER; note = 2' Fluoro-uridine
  modified_base 8: mod_base = gm
  modified_base 9: mod_base = OTHER; note = 2' Fluoro-guanosine
  modified_base 10: mod_base = OTHER; note = 2' Fluoro-uridine
  modified_base 11: mod_base = OTHER; note = 2' Fluoro-guanosine
  modified_base 12: mod_base = gm
  modified_base 13: mod_base = um
  modified_base 14: mod_base = cm
  modified_base 15: mod_base = cm
  modified_base 16: mod_base = um
  modified_base 17: mod_base = cm
  modified_base 18: mod_base = OTHER; note = 2'O-methyl-adenosine
  modified_base 19: mod_base = um
  modified_base 20: mod_base = gm
  modified_base 21: mod_base = gm
  modified_base 1^2: mod_base = OTHER; note = phosphorothioate linkage
  modified_base 2^3: mod_base = OTHER; note = phosphorothioate linkage
ccatgctggtggtcctcatgg

SEQ ID NO: 599 - RNA, 21 nt, synthetic construct
  source 1..21: mol_type = other RNA
  misc_feature 1..21: note = Description: ZPI siRNA sense strand: ETXS705; corresponding to SEQ ID NO: 279
  modified_base 1: mod_base = um
  modified_base 2: mod_base = gm
  modified_base 3: mod_base = cm
  modified_base 4: mod_base = cm
  modified_base 5: mod_base = um
  modified_base 6: mod_base = cm
  modified_base 7: mod_base = OTHER; note = 2' Fluoro-cytidine
  modified_base 8: mod_base = OTHER; note = 2'O-methyl-adenosine
  modified_base 9: mod_base = OTHER; note = 2' Fluoro-cytidine
  modified_base 10: mod_base = OTHER; note = 2' Fluoro-cytidine
  modified_base 11: mod_base = OTHER; note = 2' Fluoro-uridine
  modified_base 12: mod_base = um
  modified_base 13: mod_base = um
  modified_base 14: mod_base = gm
  modified_base 15: mod_base = OTHER; note = 2'O-methyl-adenosine
  modified_base 16: mod_base = cm
  modified_base 17: mod_base = OTHER; note = 2'O-methyl-adenosine
  modified_base 18: mod_base = OTHER; note = 2'O-methyl-adenosine
  modified_base 19: mod_base = gm
  modified_base 20: mod_base = OTHER; note = 2'O-methyl-adenosine
  modified_base 21: mod_base = OTHER; note = 2'O-methyl-adenosine
  modified_base 1^2: mod_base = OTHER; note = phosphorothioate linkage
  modified_base 2^3: mod_base = OTHER; note = phosphorothioate linkage
tgcctccacctttgacaagaa

SEQ ID NO: 600 - RNA, 21 nt, synthetic construct
  source 1..21: mol_type = other RNA
  misc_feature 1..21: note = Description: ZPI siRNA sense strand: ETXS707; corresponding to SEQ ID NO: 280
  modified_base 1: mod_base = cm
  modified_base 2: mod_base = cm
  modified_base 3: mod_base = um
  modified_base 4: mod_base = cm
  modified_base 5: mod_base = cm
  modified_base 6: mod_base = OTHER; note = 2'O-methyl-adenosine
  modified_base 7: mod_base = OTHER; note = 2' Fluoro-cytidine
  modified_base 8: mod_base = cm
  modified_base 9: mod_base = OTHER; note = 2' Fluoro-uridine
  modified_base 10: mod_base = OTHER; note = 2' Fluoro-uridine
  modified_base 11: mod_base = OTHER; note = 2' Fluoro-uridine
  modified_base 12: mod_base = gm
  modified_base 13: mod_base = OTHER; note = 2'O-methyl-adenosine
  modified_base 14: mod_base = cm
  modified_base 15: mod_base = OTHER; note = 2'O-methyl-adenosine
  modified_base 16: mod_base = OTHER; note = 2'O-methyl-adenosine
  modified_base 17: mod_base = gm
  modified_base 18: mod_base = OTHER; note = 2'O-methyl-adenosine
  modified_base 19: mod_base = OTHER; note = 2'O-methyl-adenosine
  modified_base 20: mod_base = um
  modified_base 21: mod_base = um
  modified_base 1^2: mod_base = OTHER; note = phosphorothioate linkage
  modified_base 2^3: mod_base = OTHER; note = phosphorothioate linkage
cctccacctttgacaagaatt

SEQ ID NO: 601 - RNA, 21 nt, synthetic construct
  source 1..21: mol_type = other RNA
  misc_feature 1..21: note = Description: ZPI siRNA sense strand: ETXS709; corresponding to SEQ ID NO: 281
  modified_base 1: mod_base = cm
  modified_base 2: mod_base = OTHER; note = 2'O-methyl-adenosine
  modified_base 3: mod_base = um
  modified_base 4: mod_base = um
  modified_base 5: mod_base = OTHER; note = 2'O-methyl-adenosine
  modified_base 6: mod_base = OTHER; note = 2'O-methyl-adenosine
  modified_base 7: mod_base = OTHER; note = 2' Fluoro-guanosine
  modified_base 8: mod_base = gm
  modified_base 9: mod_base = OTHER; note = 2' Fluoro-uridine
  modified_base 10: mod_base = OTHER; note = 2' Fluoro-guanosine
  modified_base 11: mod_base = OTHER; note = 2' Fluoro-cytidine
  modified_base 12: mod_base = cm
  modified_base 13: mod_base = cm
  modified_base 14: mod_base = OTHER; note = 2'O-methyl-adenosine
  modified_base 15: mod_base = um
  modified_base 16: mod_base = gm
  modified_base 17: mod_base = OTHER; note = 2'O-methyl-adenosine
  modified_base 18: mod_base = um
  modified_base 19: mod_base = gm
  modified_base 20: mod_base = um
  modified_base 21: mod_base = OTHER; note = 2'O-methyl-adenosine
  modified_base 1^2: mod_base = OTHER; note = phosphorothioate linkage
  modified_base 2^3: mod_base = OTHER; note = phosphorothioate linkage
cattaaggtgcccatgatgta

SEQ ID NO: 602 - RNA, 21 nt, synthetic construct
  source 1..21: mol_type = other RNA
  misc_feature 1..21: note = Description: ZPI siRNA sense strand: ETXS711; corresponding to SEQ ID NO: 282
  modified_base 1: mod_base = cm
  modified_base 2: mod_base = um
  modified_base 3: mod_base = gm
  modified_base 4: mod_base = cm
  modified_base 5: mod_base = cm
  modified_base 6: mod_base = cm
  modified_base 7: mod_base = OTHER; note = 2' Fluoro-uridine
  modified_base 8: mod_base = OTHER; note = 2'O-methyl-adenosine
  modified_base 9: mod_base = OTHER; note = 2' Fluoro-cytidine
  modified_base 10: mod_base = OTHER; note = 2' Fluoro-cytidine
  modified_base 11: mod_base = OTHER; note = 2'-Fluoro-adenosine
  modified_base 12: mod_base = OTHER; note = 2'O-methyl-adenosine
  modified_base 13: mod_base = gm
  modified_base 14: mod_base = gm
  modified_base 15: mod_base = OTHER; note = 2'O-methyl-adenosine
  modified_base 16: mod_base = OTHER; note = 2'O-methyl-adenosine
  modified_base 17: mod_base = OTHER; note = 2'O-methyl-adenosine
  modified_base 18: mod_base = um
  modified_base 19: mod_base = gm
  modified_base 20: mod_base = cm
  modified_base 21: mod_base = cm
  modified_base 1^2: mod_base = OTHER; note = phosphorothioate linkage
  modified_base 2^3: mod_base = OTHER; note = phosphorothioate linkage
ctgccctaccaaggaaatgcc

SEQ ID NO: 603 - RNA, 21 nt, synthetic construct
  source 1..21: mol_type = other RNA
  misc_feature 1..21: note = Description: ZPI siRNA sense strand: ETXS713; corresponding to SEQ ID NO: 283
  modified_base 1: mod_base = cm
  modified_base 2: mod_base = OTHER; note = 2'O-methyl-adenosine
  modified_base 3: mod_base = OTHER; note = 2'O-methyl-adenosine
  modified_base 4: mod_base = OTHER; note = 2'O-methyl-adenosine
  modified_base 5: mod_base = cm
  modified_base 6: mod_base = um
  modified_base 7: mod_base = OTHER; note = 2' Fluoro-guanosine
  modified_base 8: mod_base = cm
  modified_base 9: mod_base = OTHER; note = 2' Fluoro-cytidine
  modified_base 10: mod_base = OTHER; note = 2' Fluoro-cytidine
  modified_base 11: mod_base = OTHER; note = 2' Fluoro-uridine
  modified_base 12: mod_base = OTHER; note = 2'O-methyl-adenosine
  modified_base 13: mod_base = cm
  modified_base 14: mod_base = cm
  modified_base 15: mod_base = OTHER; note = 2'O-methyl-adenosine
  modified_base 16: mod_base = OTHER; note = 2'O-methyl-adenosine
  modified_base 17: mod_base = gm
  modified_base 18: mod_base = gm
  modified_base 19: mod_base = OTHER; note = 2'O-methyl-adenosine
  modified_base 20: mod_base = OTHER; note = 2'O-methyl-adenosine
  modified_base 21: mod_base = OTHER; note = 2'O-methyl-adenosine
  modified_base 1^2: mod_base = OTHER; note = phosphorothioate linkage
  modified_base 2^3: mod_base = OTHER; note = phosphorothioate linkage
caaactgccctaccaaggaaa

SEQ ID NO: 604 - RNA, 21 nt, synthetic construct
  source 1..21: mol_type = other RNA
  misc_feature 1..21: note = Description: ZPI siRNA sense strand: ETXS715; corresponding to SEQ ID NO: 284
  modified_base 1: mod_base = um
  modified_base 2: mod_base = cm
  modified_base 3: mod_base = OTHER; note = 2'O-methyl-adenosine
  modified_base 4: mod_base = OTHER; note = 2'O-methyl-adenosine
  modified_base 5: mod_base = OTHER; note = 2'O-methyl-adenosine
  modified_base 6: mod_base = cm
  modified_base 7: mod_base = OTHER; note = 2' Fluoro-uridine
  modified_base 8: mod_base = gm
  modified_base 9: mod_base = OTHER; note = 2' Fluoro-cytidine
  modified_base 10: mod_base = OTHER; note = 2' Fluoro-cytidine
  modified_base 11: mod_base = OTHER; note = 2' Fluoro-cytidine
  modified_base 12: mod_base = um
  modified_base 13: mod_base = OTHER; note = 2'O-methyl-adenosine
  modified_base 14: mod_base = cm
  modified_base 15: mod_base = cm
  modified_base 16: mod_base = OTHER; note = 2'O-methyl-adenosine
  modified_base 17: mod_base = OTHER; note = 2'O-methyl-adenosine
  modified_base 18: mod_base = gm
  modified_base 19: mod_base = gm
  modified_base 20: mod_base = OTHER; note = 2'O-methyl-adenosine
  modified_base 21: mod_base = OTHER; note = 2'O-methyl-adenosine
  modified_base 1^2: mod_base = OTHER; note = phosphorothioate linkage
  modified_base 2^3: mod_base = OTHER; note = phosphorothioate linkage
tcaaactgccctaccaaggaa

SEQ ID NO: 605 - RNA, 21 nt, synthetic construct
  source 1..21: mol_type = other RNA
  misc_feature 1..21: note = Description: ZPI siRNA sense strand: ETXS717; corresponding to SEQ ID NO: 285
  modified_base 1: mod_base = cm
  modified_base 2: mod_base = um
  modified_base 3: mod_base = cm
  modified_base 4: mod_base = cm
  modified_base 5: mod_base = OTHER; note = 2'O-methyl-adenosine
  modified_base 6: mod_base = cm
  modified_base 7: mod_base = OTHER; note = 2' Fluoro-cytidine
  modified_base 8: mod_base = um
  modified_base 9: mod_base = OTHER; note = 2' Fluoro-uridine
  modified_base 10: mod_base = OTHER; note = 2' Fluoro-uridine
  modified_base 11: mod_base = OTHER; note = 2' Fluoro-guanosine
  modified_base 12: mod_base = OTHER; note = 2'O-methyl-adenosine
  modified_base 13: mod_base = cm
  modified_base 14: mod_base = OTHER; note = 2'O-methyl-adenosine
  modified_base 15: mod_base = OTHER; note = 2'O-methyl-adenosine
  modified_base 16: mod_base = gm
  modified_base 17: mod_base = OTHER; note = 2'O-methyl-adenosine
  modified_base 18: mod_base = OTHER; note = 2'O-methyl-adenosine
  modified_base 19: mod_base = um
  modified_base 20: mod_base = um
  modified_base 21: mod_base = um
  modified_base 1^2: mod_base = OTHER; note = phosphorothioate linkage
  modified_base 2^3: mod_base = OTHER; note = phosphorothioate linkage
ctccacctttgacaagaattt

SEQ ID NO: 606 - RNA, 21 nt, synthetic construct
  source 1..21: mol_type = other RNA
  misc_feature 1..21: note = Description: ZPI siRNA sense strand: ETXS719; corresponding to SEQ ID NO: 286
  modified_base 1: mod_base = cm
  modified_base 2: mod_base = gm
  modified_base 3: mod_base = OTHER; note = 2'O-methyl-adenosine
  modified_base 4: mod_base = cm
  modified_base 5: mod_base = OTHER; note = 2'O-methyl-adenosine
  modified_base 6: mod_base = cm
  modified_base 7: mod_base = OTHER; note = 2' Fluoro-uridine
  modified_base 8: mod_base = um
  modified_base 9: mod_base = OTHER; note = 2' Fluoro-uridine
  modified_base 10: mod_base = OTHER; note = 2' Fluoro-cytidine
  modified_base 11: mod_base = OTHER; note = 2' Fluoro-cytidine
  modified_base 12: mod_base = OTHER; note = 2'O-methyl-adenosine
  modified_base 13: mod_base = cm
  modified_base 14: mod_base = cm
  modified_base 15: mod_base = um
  modified_base 16: mod_base = gm
  modified_base 17: mod_base = gm
  modified_base 18: mod_base = OTHER; note = 2'O-methyl-adenosine
  modified_base 19: mod_base = cm
  modified_base 20: mod_base = OTHER; note = 2'O-methyl-adenosine
  modified_base 21: mod_base = OTHER; note = 2'O-methyl-adenosine
  modified_base 1^2: mod_base = OTHER; note = phosphorothioate linkage
  modified_base 2^3: mod_base = OTHER; note = phosphorothioate linkage
cgacactttccacctggacaa

SEQ ID NO: 607 - RNA, 21 nt, synthetic construct
  source 1..21: mol_type = other RNA
  misc_feature 1..21: note = Description: ZPI siRNA sense strand: ETXS721; corresponding to SEQ ID NO: 287
  modified_base 1: mod_base = OTHER; note = 2'O-methyl-adenosine
  modified_base 2: mod_base = cm
  modified_base 3: mod_base = um
  modified_base 4: mod_base = um
  modified_base 5: mod_base = um
  modified_base 6: mod_base = cm
  modified_base 7: mod_base = OTHER; note = 2' Fluoro-cytidine
  modified_base 8: mod_base = OTHER; note = 2'O-methyl-adenosine
  modified_base 9: mod_base = OTHER; note = 2' Fluoro-cytidine
  modified_base 10: mod_base = OTHER; note = 2' Fluoro-cytidine
  modified_base 11: mod_base = OTHER; note = 2' Fluoro-uridine
  modified_base 12: mod_base = gm
  modified_base 13: mod_base = gm
  modified_base 14: mod_base = OTHER; note = 2'O-methyl-adenosine
  modified_base 15: mod_base = cm
  modified_base 16: mod_base = OTHER; note = 2'O-methyl-adenosine
  modified_base 17: mod_base = OTHER; note = 2'O-methyl-adenosine
  modified_base 18: mod_base = gm
  modified_base 19: mod_base = um
  modified_base 20: mod_base = OTHER; note = 2'O-methyl-adenosine
  modified_base 21: mod_base = cm
  modified_base 1^2: mod_base = OTHER; note = phosphorothioate linkage
  modified_base 2^3: mod_base = OTHER; note = phosphorothioate linkage
actttccacctggacaagtac

SEQ ID NO: 608 - RNA, 21 nt, synthetic construct
  source 1..21: mol_type = other RNA
  misc_feature 1..21: note = Description: ZPI siRNA sense strand: ETXS723; corresponding to SEQ ID NO: 288
  modified_base 1: mod_base = OTHER; note = 2'O-methyl-adenosine
  modified_base 2: mod_base = OTHER; note = 2'O-methyl-adenosine
  modified_base 3: mod_base = OTHER; note = 2'O-methyl-adenosine
  modified_base 4: mod_base = cm
  modified_base 5: mod_base = um
  modified_base 6: mod_base = gm
  modified_base 7: mod_base = OTHER; note = 2' Fluoro-cytidine
  modified_base 8: mod_base = cm
  modified_base 9: mod_base = OTHER; note = 2' Fluoro-cytidine
  modified_base 10: mod_base = OTHER; note = 2' Fluoro-uridine
  modified_base 11: mod_base = OTHER; note = 2'-Fluoro-adenosine
  modified_base 12: mod_base = cm
  modified_base 13: mod_base = cm
  modified_base 14: mod_base = OTHER; note = 2'O-methyl-adenosine
  modified_base 15: mod_base = OTHER; note = 2'O-methyl-adenosine
  modified_base 16: mod_base = gm
  modified_base 17: mod_base = gm
  modified_base 18: mod_base = OTHER; note = 2'O-methyl-adenosine
  modified_base 19: mod_base = OTHER; note = 2'O-methyl-adenosine
  modified_base 20: mod_base = OTHER; note = 2'O-methyl-adenosine
  modified_base 21: mod_base = um
  modified_base 1^2: mod_base = OTHER; note = phosphorothioate linkage
  modified_base 2^3: mod_base = OTHER; note = phosphorothioate linkage
aaactgccctaccaaggaaat

SEQ ID NO: 609 - RNA, 21 nt, synthetic construct
  source 1..21: mol_type = other RNA
  misc_feature 1..21: note = Description: ZPI siRNA sense strand: ETXS725; corresponding to SEQ ID NO: 289
  modified_base 1: mod_base = OTHER; note = 2'O-methyl-adenosine
  modified_base 2: mod_base = cm
  modified_base 3: mod_base = um
  modified_base 4: mod_base = gm
  modified_base 5: mod_base = cm
  modified_base 6: mod_base = cm
  modified_base 7: mod_base = OTHER; note = 2' Fluoro-cytidine
  modified_base 8: mod_base = um
  modified_base 9: mod_base = OTHER; note = 2'-Fluoro-adenosine
  modified_base 10: mod_base = OTHER; note = 2' Fluoro-cytidine
  modified_base 11: mod_base = OTHER; note = 2' Fluoro-cytidine
  modified_base 12: mod_base = OTHER; note = 2'O-methyl-adenosine
  modified_base 13: mod_base = OTHER; note = 2'O-methyl-adenosine
  modified_base 14: mod_base = gm
  modified_base 15: mod_base = gm
  modified_base 16: mod_base = OTHER; note = 2'O-methyl-adenosine
  modified_base 17: mod_base = OTHER; note = 2'O-methyl-adenosine
  modified_base 18: mod_base = OTHER; note = 2'O-methyl-adenosine
  modified_base 19: mod_base = um
  modified_base 20: mod_base = gm
  modified_base 21: mod_base = cm
  modified_base 1^2: mod_base = OTHER; note = phosphorothioate linkage
  modified_base 2^3: mod_base = OTHER; note = phosphorothioate linkage
actgccctaccaaggaaatgc

SEQ ID NO: 610 - RNA, 21 nt, synthetic construct
  source 1..21: mol_type = other RNA
  misc_feature 1..21: note = Description: ZPI siRNA sense strand: ETXS727; corresponding to SEQ ID NO: 290
  modified_base 1: mod_base = cm
  modified_base 2: mod_base = OTHER; note = 2'O-methyl-adenosine
  modified_base 3: mod_base = cm
  modified_base 4: mod_base = um
  modified_base 5: mod_base = um
  modified_base 6: mod_base = um
  modified_base 7: mod_base = OTHER; note = 2' Fluoro-cytidine
  modified_base 8: mod_base = cm
  modified_base 9: mod_base = OTHER; note = 2'-Fluoro-adenosine
  modified_base 10: mod_base = OTHER; note = 2' Fluoro-cytidine
  modified_base 11: mod_base = OTHER; note = 2' Fluoro-cytidine
  modified_base 12: mod_base = um
  modified_base 13: mod_base = gm
  modified_base 14: mod_base = gm
  modified_base 15: mod_base = OTHER; note = 2'O-methyl-adenosine
  modified_base 16: mod_base = cm
  modified_base 17: mod_base = OTHER; note = 2'O-methyl-adenosine
  modified_base 18: mod_base = OTHER; note = 2'O-methyl-adenosine
  modified_base 19: mod_base = gm
  modified_base 20: mod_base = um
  modified_base 21: mod_base = OTHER; note = 2'O-methyl-adenosine
  modified_base 1^2: mod_base = OTHER; note = phosphorothioate linkage
  modified_base 2^3: mod_base = OTHER; note = phosphorothioate linkage
cactttccacctggacaagta

SEQ ID NO: 611 - RNA, 21 nt, synthetic construct
  source 1..21: mol_type = other RNA
  misc_feature 1..21: note = Description: ZPI siRNA sense strand: ETXS729; corresponding to SEQ ID NO: 291
  modified_base 1: mod_base = cm
  modified_base 2: mod_base = cm
  modified_base 3: mod_base = OTHER; note = 2'O-methyl-adenosine
  modified_base 4: mod_base = um
  modified_base 5: mod_base = um
  modified_base 6: mod_base = OTHER; note = 2'O-methyl-adenosine
  modified_base 7: mod_base = OTHER; note = 2'-Fluoro-adenosine
  modified_base 8: mod_base = gm
  modified_base 9: mod_base = OTHER; note = 2' Fluoro-guanosine
  modified_base 10: mod_base = OTHER; note = 2' Fluoro-uridine
  modified_base 11: mod_base = OTHER; note = 2' Fluoro-guanosine
  modified_base 12: mod_base = cm
  modified_base 13: mod_base = cm
  modified_base 14: mod_base = cm
  modified_base 15: mod_base = OTHER; note = 2'O-methyl-adenosine
  modified_base 16: mod_base = um
  modified_base 17: mod_base = gm
  modified_base 18: mod_base = OTHER; note = 2'O-methyl-adenosine
  modified_base 19: mod_base = um
  modified_base 20: mod_base = gm
  modified_base 21: mod_base = um
  modified_base 1^2: mod_base = OTHER; note = phosphorothioate linkage
  modified_base 2^3: mod_base = OTHER; note = phosphorothioate linkage
ccattaaggtgcccatgatgt

SEQ ID NO: 612 - RNA, 21 nt, synthetic construct
  source 1..21: mol_type = other RNA
  misc_feature 1..21: note = Description: ZPI siRNA sense strand: ETXS731; corresponding to SEQ ID NO: 292
  modified_base 1: mod_base = um
  modified_base 2: mod_base = um
  modified_base 3: mod_base = gm
  modified_base 4: mod_base = cm
  modified_base 5: mod_base = cm
  modified_base 6: mod_base = um
  modified_base 7: mod_base = OTHER; note = 2' Fluoro-cytidine
  modified_base 8: mod_base = cm
  modified_base 9: mod_base = OTHER; note = 2'-Fluoro-adenosine
  modified_base 10: mod_base = OTHER; note = 2' Fluoro-cytidine
  modified_base 11: mod_base = OTHER; note = 2' Fluoro-cytidine
  modified_base 12: mod_base = um
  modified_base 13: mod_base = um
  modified_base 14: mod_base = um
  modified_base 15: mod_base = gm
  modified_base 16: mod_base = OTHER; note = 2'O-methyl-adenosine
  modified_base 17: mod_base = cm
  modified_base 18: mod_base = OTHER; note = 2'O-methyl-adenosine
  modified_base 19: mod_base = OTHER; note = 2'O-methyl-adenosine
  modified_base 20: mod_base = gm
  modified_base 21: mod_base = OTHER; note = 2'O-methyl-adenosine
  modified_base 1^2: mod_base = OTHER; note = phosphorothioate linkage
  modified_base 2^3: mod_base = OTHER; note = phosphorothioate linkage
ttgcctccacctttgacaaga

SEQ ID NO: 613 - RNA, 21 nt, synthetic construct
  source 1..21: mol_type = other RNA
  misc_feature 1..21: note = Description: ZPI siRNA sense strand: ETXS733; corresponding to SEQ ID NO: 293
  modified_base 1: mod_base = um
  modified_base 2: mod_base = um
  modified_base 3: mod_base = um
  modified_base 4: mod_base = cm
  modified_base 5: mod_base = cm
  modified_base 6: mod_base = OTHER; note = 2'O-methyl-adenosine
  modified_base 7: mod_base = OTHER; note = 2' Fluoro-cytidine
  modified_base 8: mod_base = cm
  modified_base 9: mod_base = OTHER; note = 2' Fluoro-uridine
  modified_base 10: mod_base = OTHER; note = 2' Fluoro-guanosine
  modified_base 11: mod_base = OTHER; note = 2' Fluoro-guanosine
  modified_base 12: mod_base = OTHER; note = 2'O-methyl-adenosine
  modified_base 13: mod_base = cm
  modified_base 14: mod_base = OTHER; note = 2'O-methyl-adenosine
  modified_base 15: mod_base = OTHER; note = 2'O-methyl-adenosine
  modified_base 16: mod_base = gm
  modified_base 17: mod_base = um
  modified_base 18: mod_base = OTHER; note = 2'O-methyl-adenosine
  modified_base 19: mod_base = cm
  modified_base 20: mod_base = OTHER; note = 2'O-methyl-adenosine
  modified_base 21: mod_base = OTHER; note = 2'O-methyl-adenosine
  modified_base 1^2: mod_base = OTHER; note = phosphorothioate linkage
  modified_base 2^3: mod_base = OTHER; note = phosphorothioate linkage
tttccacctggacaagtacaa

SEQ ID NO: 614 - RNA, 21 nt, synthetic construct
  source 1..21: mol_type = other RNA
  misc_feature 1..21: note = Description: ZPI siRNA sense strand: ETXS735; corresponding to SEQ ID NO: 294
  modified_base 1: mod_base = um
  modified_base 2: mod_base = cm
  modified_base 3: mod_base = cm
  modified_base 4: mod_base = um
  modified_base 5: mod_base = cm
  modified_base 6: mod_base = OTHER; note = 2'O-methyl-adenosine
  modified_base 7: mod_base = OTHER; note = 2'-Fluoro-adenosine
  modified_base 8: mod_base = OTHER; note = 2'O-methyl-adenosine
  modified_base 9: mod_base = OTHER; note = 2' Fluoro-cytidine
  modified_base 10: mod_base = OTHER; note = 2' Fluoro-uridine
  modified_base 11: mod_base = OTHER; note = 2' Fluoro-guanosine
  modified_base 12: mod_base = cm
  modified_base 13: mod_base = cm
  modified_base 14: mod_base = cm
  modified_base 15: mod_base = um
  modified_base 16: mod_base = OTHER; note = 2'O-methyl-adenosine
  modified_base 17: mod_base = cm
  modified_base 18: mod_base = cm
  modified_base 19: mod_base = OTHER; note = 2'O-methyl-adenosine
  modified_base 20: mod_base = OTHER; note = 2'O-methyl-adenosine
  modified_base 21: mod_base = gm
  modified_base 1^2: mod_base = OTHER; note = phosphorothioate linkage
  modified_base 2^3: mod_base = OTHER; note = phosphorothioate linkage
tcctcaaactgccctaccaag

SEQ ID NO: 615 - RNA, 21 nt, synthetic construct
  source 1..21: mol_type = other RNA
  misc_feature 1..21: note = Description: ZPI siRNA sense strand: ETXS737; corresponding to SEQ ID NO: 295
  modified_base 1: mod_base = OTHER; note = 2'O-methyl-adenosine
  modified_base 2: mod_base = OTHER; note = 2'O-methyl-adenosine
  modified_base 3: mod_base = cm
  modified_base 4: mod_base = um
  modified_base 5: mod_base = gm
  modified_base 6: mod_base = cm
  modified_base 7: mod_base = OTHER; note = 2' Fluoro-cytidine
  modified_base 8: mod_base = cm
  modified_base 9: mod_base = OTHER; note = 2' Fluoro-uridine
  modified_base 10: mod_base = OTHER; note = 2'-Fluoro-adenosine
  modified_base 11: mod_base = OTHER; note = 2' Fluoro-cytidine
  modified_base 12: mod_base = cm
  modified_base 13: mod_base = OTHER; note = 2'O-methyl-adenosine
  modified_base 14: mod_base = OTHER; note = 2'O-methyl-adenosine
  modified_base 15: mod_base = gm
  modified_base 16: mod_base = gm
  modified_base 17: mod_base = OTHER; note = 2'O-methyl-adenosine
  modified_base 18: mod_base = OTHER; note = 2'O-methyl-adenosine
  modified_base 19: mod_base = OTHER; note = 2'O-methyl-adenosine
  modified_base 20: mod_base = um
  modified_base 21: mod_base = gm
  modified_base 1^2: mod_base = OTHER; note = phosphorothioate linkage
  modified_base 2^3: mod_base = OTHER; note = phosphorothioate linkage
aactgccctaccaaggaaatg

SEQ ID NO: 616 - RNA, 21 nt, synthetic construct
  source 1..21: mol_type = other RNA
  misc_feature 1..21: note = Description: ZPI siRNA sense strand: ETXS739; corresponding to SEQ ID NO: 296
  modified_base 1: mod_base = cm
  modified_base 2: mod_base = cm
  modified_base 3: mod_base = um
  modified_base 4: mod_base = cm
  modified_base 5: mod_base = OTHER; note = 2'O-methyl-adenosine
  modified_base 6: mod_base = OTHER; note = 2'O-methyl-adenosine
  modified_base 7: mod_base = OTHER; note = 2'-Fluoro-adenosine
  modified_base 8: mod_base = cm
  modified_base 9: mod_base = OTHER; note = 2' Fluoro-uridine
  modified_base 10: mod_base = OTHER; note = 2' Fluoro-guanosine
  modified_base 11: mod_base = OTHER; note = 2' Fluoro-cytidine
  modified_base 12: mod_base = cm
  modified_base 13: mod_base = cm
  modified_base 14: mod_base = um
  modified_base 15: mod_base = OTHER; note = 2'O-methyl-adenosine
  modified_base 16: mod_base = cm
  modified_base 17: mod_base = cm
  modified_base 18: mod_base = OTHER; note = 2'O-methyl-adenosine
  modified_base 19: mod_base = OTHER; note = 2'O-methyl-adenosine
  modified_base 20: mod_base = gm
  modified_base 21: mod_base = gm
  modified_base 1^2: mod_base = OTHER; note = phosphorothioate linkage
  modified_base 2^3: mod_base = OTHER; note = phosphorothioate linkage
cctcaaactgccctaccaagg

SEQ ID NO: 617 - RNA, 21 nt, synthetic construct
  source 1..21: mol_type = other RNA
  misc_feature 1..21: note = Description: ZPI siRNA sense strand: ETXS741; corresponding to SEQ ID NO: 297
  modified_base 1: mod_base = gm
  modified_base 2: mod_base = um
  modified_base 3: mod_base = cm
  modified_base 4: mod_base = cm
  modified_base 5: mod_base = um
  modified_base 6: mod_base = cm
  modified_base 7: mod_base = OTHER; note = 2'-Fluoro-adenosine
  modified_base 8: mod_base = OTHER; note = 2'O-methyl-adenosine
  modified_base 9: mod_base = OTHER; note = 2'-Fluoro-adenosine
  modified_base 10: mod_base = OTHER; note = 2' Fluoro-cytidine
  modified_base 11: mod_base = OTHER; note = 2' Fluoro-uridine
  modified_base 12: mod_base = gm
  modified_base 13: mod_base = cm
  modified_base 14: mod_base = cm
  modified_base 15: mod_base = cm
  modified_base 16: mod_base = um
  modified_base 17: mod_base = OTHER; note = 2'O-methyl-adenosine
  modified_base 18: mod_base = cm
  modified_base 19: mod_base = cm
  modified_base 20: mod_base = OTHER; note = 2'O-methyl-adenosine
  modified_base 21: mod_base = OTHER; note = 2'O-methyl-adenosine
  modified_base 1^2: mod_base = OTHER; note = phosphorothioate linkage
  modified_base 2^3: mod_base = OTHER; note = phosphorothioate linkage
gtcctcaaactgccctaccaa

SEQ ID NO: 618 - RNA, 21 nt, synthetic construct
  source 1..21: mol_type = other RNA
  misc_feature 1..21: note = Description: ZPI siRNA sense strand: ETXS743; corresponding to SEQ ID NO: 298
  modified_base 1: mod_base = gm
  modified_base 2: mod_base = OTHER; note = 2'O-methyl-adenosine
  modified_base 3: mod_base = cm
  modified_base 4: mod_base = OTHER; note = 2'O-methyl-adenosine
  modified_base 5: mod_base = cm
  modified_base 6: mod_base = um
  modified_base 7: mod_base = OTHER; note = 2' Fluoro-uridine
  modified_base 8: mod_base = um
  modified_base 9: mod_base = OTHER; note = 2' Fluoro-cytidine
  modified_base 10: mod_base = OTHER; note = 2' Fluoro-cytidine
  modified_base 11: mod_base = OTHER; note = 2'-Fluoro-adenosine
  modified_base 12: mod_base = cm
  modified_base 13: mod_base = cm
  modified_base 14: mod_base = um
  modified_base 15: mod_base = gm
  modified_base 16: mod_base = gm
  modified_base 17: mod_base = OTHER; note = 2'O-methyl-adenosine
  modified_base 18: mod_base = cm
  modified_base 19: mod_base = OTHER; note = 2'O-methyl-adenosine
  modified_base 20: mod_base = OTHER; note = 2'O-methyl-adenosine
  modified_base 21: mod_base = gm
  modified_base 1^2: mod_base = OTHER; note = phosphorothioate linkage
  modified_base 2^3: mod_base = OTHER; note = phosphorothioate linkage
gacactttccacctggacaag

SEQ ID NO: 619 - RNA, 21 nt, synthetic construct
  source 1..21: mol_type = other RNA
  misc_feature 1..21: note = Description: ZPI siRNA sense strand: ETXS745; corresponding to SEQ ID NO: 299
  modified_base 1: mod_base = um
  modified_base 2: mod_base = um
  modified_base 3: mod_base = um
  modified_base 4: mod_base = gm
  modified_base 5: mod_base = cm
  modified_base 6: mod_base = cm
  modified_base 7: mod_base = OTHER; note = 2' Fluoro-uridine
  modified_base 8: mod_base = cm
  modified_base 9: mod_base = OTHER; note = 2' Fluoro-cytidine
  modified_base 10: mod_base = OTHER; note = 2'-Fluoro-adenosine
  modified_base 11: mod_base = OTHER; note = 2' Fluoro-cytidine
  modified_base 12: mod_base = cm
  modified_base 13: mod_base = um
  modified_base 14: mod_base = um
  modified_base 15: mod_base = um
  modified_base 16: mod_base = gm
  modified_base 17: mod_base = OTHER; note = 2'O-methyl-adenosine
  modified_base 18: mod_base = cm
  modified_base 19: mod_base = OTHER; note = 2'O-methyl-adenosine
  modified_base 20: mod_base = OTHER; note = 2'O-methyl-adenosine
  modified_base 21: mod_base = gm
  modified_base 1^2: mod_base = OTHER; note = phosphorothioate linkage
  modified_base 2^3: mod_base = OTHER; note = phosphorothioate linkage
tttgcctccacctttgacaag

SEQ ID NO: 620 - RNA, 21 nt, synthetic construct
  source 1..21: mol_type = other RNA
  misc_feature 1..21: note = Description: ZPI siRNA sense strand: ETXS747; corresponding to SEQ ID NO: 300
  modified_base 1: mod_base = OTHER; note = 2'O-methyl-adenosine
  modified_base 2: mod_base = cm
  modified_base 3: mod_base = OTHER; note = 2'O-methyl-adenosine
  modified_base 4: mod_base = cm
  modified_base 5: mod_base = um
  modified_base 6: mod_base = um
  modified_base 7: mod_base = OTHER; note = 2' Fluoro-uridine
  modified_base 8: mod_base = cm
  modified_base 9: mod_base = OTHER; note = 2' Fluoro-cytidine
  modified_base 10: mod_base = OTHER; note = 2'-Fluoro-adenosine
  modified_base 11: mod_base = OTHER; note = 2' Fluoro-cytidine
  modified_base 12: mod_base = cm
  modified_base 13: mod_base = um
  modified_base 14: mod_base = gm
  modified_base 15: mod_base = gm
  modified_base 16: mod_base = OTHER; note = 2'O-methyl-adenosine
  modified_base 17: mod_base = cm
  modified_base 18: mod_base = OTHER; note = 2'O-methyl-adenosine
  modified_base 19: mod_base = OTHER; note = 2'O-methyl-adenosine
  modified_base 20: mod_base = gm
  modified_base 21: mod_base = um
  modified_base 1^2: mod_base = OTHER; note = phosphorothioate linkage
  modified_base 2^3: mod_base = OTHER; note = phosphorothioate linkage
acactttccacctggacaagt

SEQ ID NO: 621 - RNA, 21 nt, synthetic construct
  source 1..21: mol_type = other RNA
  misc_feature 1..21: note = Description: ZPI siRNA sense strand: ETXS749; corresponding to SEQ ID NO: 301
  modified_base 1: mod_base = um
  modified_base 2: mod_base = um
  modified_base 3: mod_base = cm
  modified_base 4: mod_base = cm
  modified_base 5: mod_base = OTHER; note = 2'O-methyl-adenosine
  modified_base 6: mod_base = cm
  modified_base 7: mod_base = OTHER; note = 2' Fluoro-cytidine
  modified_base 8: mod_base = um
  modified_base 9: mod_base = OTHER; note = 2' Fluoro-guanosine
  modified_base 10: mod_base = OTHER; note = 2' Fluoro-guanosine
  modified_base 11: mod_base = OTHER; note = 2'-Fluoro-adenosine
  modified_base 12: mod_base = cm
  modified_base 13: mod_base = OTHER; note = 2'O-methyl-adenosine
  modified_base 14: mod_base = OTHER; note = 2'O-methyl-adenosine
  modified_base 15: mod_base = gm
  modified_base 16: mod_base = um
  modified_base 17: mod_base = OTHER; note = 2'O-methyl-adenosine
  modified_base 18: mod_base = cm
  modified_base 19: mod_base = OTHER; note = 2'O-methyl-adenosine
  modified_base 20: mod_base = OTHER; note = 2'O-methyl-adenosine
  modified_base 21: mod_base = gm
  modified_base 1^2: mod_base = OTHER; note = phosphorothioate linkage
  modified_base 2^3: mod_base = OTHER; note = phosphorothioate linkage
ttccacctggacaagtacaag

SEQ ID NO: 622 - RNA, 21 nt, synthetic construct
  source 1..21: mol_type = other RNA
  misc_feature 1..21: note = Description: ZPI siRNA sense strand: ETXS751; corresponding to SEQ ID NO: 302
  modified_base 1: mod_base = cm
  modified_base 2: mod_base = um
  modified_base 3: mod_base = um
  modified_base 4: mod_base = um
  modified_base 5: mod_base = cm
  modified_base 6: mod_base = cm
  modified_base 7: mod_base = OTHER; note = 2'-Fluoro-adenosine
  modified_base 8: mod_base = cm
  modified_base 9: mod_base = OTHER; note = 2' Fluoro-cytidine
  modified_base 10: mod_base = OTHER; note = 2' Fluoro-uridine
  modified_base 11: mod_base = OTHER; note = 2' Fluoro-guanosine
  modified_base 12: mod_base = gm
  modified_base 13: mod_base = OTHER; note = 2'O-methyl-adenosine
  modified_base 14: mod_base = cm
  modified_base 15: mod_base = OTHER; note = 2'O-methyl-adenosine
  modified_base 16: mod_base = OTHER; note = 2'O-methyl-adenosine
  modified_base 17: mod_base = gm
  modified_base 18: mod_base = um
  modified_base 19: mod_base = OTHER; note = 2'O-methyl-adenosine
  modified_base 20: mod_base = cm
  modified_base 21: mod_base = OTHER; note = 2'O-methyl-adenosine
  modified_base 1^2: mod_base = OTHER; note = phosphorothioate linkage
  modified_base 2^3: mod_base = OTHER; note = phosphorothioate linkage
ctttccacctggacaagtaca

SEQ ID NO: 623 - RNA, 21 nt, synthetic construct
  source 1..21: mol_type = other RNA
  misc_feature 1..21: note = Description: ZPI siRNA sense strand: ETXS753; corresponding to SEQ ID NO: 303
  modified_base 1: mod_base = cm
  modified_base 2: mod_base = um
  modified_base 3: mod_base = cm
  modified_base 4: mod_base = OTHER; note = 2'O-methyl-adenosine
  modified_base 5: mod_base = OTHER; note = 2'O-methyl-adenosine
  modified_base 6: mod_base = OTHER; note = 2'O-methyl-adenosine
  modified_base 7: mod_base = OTHER; note = 2' Fluoro-cytidine
  modified_base 8: mod_base = um
  modified_base 9: mod_base = OTHER; note = 2' Fluoro-guanosine
  modified_base 10: mod_base = OTHER; note = 2' Fluoro-cytidine
  modified_base 11: mod_base = OTHER; note = 2' Fluoro-cytidine
  modified_base 12: mod_base = cm
  modified_base 13: mod_base = um
  modified_base 14: mod_base = OTHER; note = 2'O-methyl-adenosine
  modified_base 15: mod_base = cm
  modified_base 16: mod_base = cm
  modified_base 17: mod_base = OTHER; note = 2'O-methyl-adenosine
  modified_base 18: mod_base = OTHER; note = 2'O-methyl-adenosine
  modified_base 19: mod_base = gm
  modified_base 20: mod_base = gm
  modified_base 21: mod_base = OTHER; note = 2'O-methyl-adenosine
  modified_base 1^2: mod_base = OTHER; note = phosphorothioate linkage
  modified_base 2^3: mod_base = OTHER; note = phosphorothioate linkage
ctcaaactgccctaccaagga

SEQ ID NO: 624 - RNA, 21 nt, synthetic construct
  source 1..21: mol_type = other RNA
  misc_feature 1..21: note = Description: ZPI siRNA sense strand: ETXS755; corresponding to SEQ ID NO: 304
  modified_base 1: mod_base = um
  modified_base 2: mod_base = um
  modified_base 3: mod_base = OTHER; note = 2'O-methyl-adenosine
  modified_base 4: mod_base = cm
  modified_base 5: mod_base = OTHER; note = 2'O-methyl-adenosine
  modified_base 6: mod_base = um
  modified_base 7: mod_base = OTHER; note = 2' Fluoro-cytidine
  modified_base 8: mod_base = um
  modified_base 9: mod_base = OTHER; note = 2' Fluoro-uridine
  modified_base 10: mod_base = OTHER; note = 2' Fluoro-guanosine
  modified_base 11: mod_base = OTHER; note = 2' Fluoro-uridine
  modified_base 12: mod_base = um
  modified_base 13: mod_base = cm
  modified_base 14: mod_base = OTHER; note = 2'O-methyl-adenosine
  modified_base 15: mod_base = OTHER; note = 2'O-methyl-adenosine
  modified_base 16: mod_base = OTHER; note = 2'O-methyl-adenosine
  modified_base 17: mod_base = gm
  modified_base 18: mod_base = gm
  modified_base 19: mod_base = gm
  modified_base 20: mod_base = OTHER; note = 2'O-methyl-adenosine
  modified_base 21: mod_base = OTHER; note = 2'O-methyl-adenosine
  modified_base 1^2: mod_base = OTHER; note = phosphorothioate linkage
  modified_base 2^3: mod_base = OTHER; note = phosphorothioate linkage
ttacatcttgttcaaagggaa

SEQ ID NO: 625 - RNA, 21 nt, synthetic construct
  source 1..21: mol_type = other RNA
  misc_feature 1..21: note = Description: ZPI siRNA sense strand: ETXS757; corresponding to SEQ ID NO: 305
  modified_base 1: mod_base = um
  modified_base 2: mod_base = gm
  modified_base 3: mod_base = cm
  modified_base 4: mod_base = cm
  modified_base 5: mod_base = OTHER; note = 2'O-methyl-adenosine
  modified_base 6: mod_base = cm
  modified_base 7: mod_base = OTHER; note = 2' Fluoro-cytidine
  modified_base 8: mod_base = OTHER; note = 2'O-methyl-adenosine
  modified_base 9: mod_base = OTHER; note = 2' Fluoro-uridine
  modified_base 10: mod_base = OTHER; note = 2' Fluoro-guanosine
  modified_base 11: mod_base = OTHER; note = 2' Fluoro-cytidine
  modified_base 12: mod_base = um
  modified_base 13: mod_base = gm
  modified_base 14: mod_base = gm
  modified_base 15: mod_base = um
  modified_base 16: mod_base = gm
  modified_base 17: mod_base = gm
  modified_base 18: mod_base = um
  modified_base 19: mod_base = cm
  modified_base 20: mod_base = cm
  modified_base 21: mod_base = um
  modified_base 1^2: mod_base = OTHER; note = phosphorothioate linkage
  modified_base 2^3: mod_base = OTHER; note = phosphorothioate linkage
tgccaccatgctggtggtcct

SEQ ID NO: 626 - RNA, 21 nt, synthetic construct
  source 1..21: mol_type = other RNA
  misc_feature 1..21: note = Description: ZPI siRNA sense strand: ETXS759; corresponding to SEQ ID NO: 306
  modified_base 1: mod_base = um
  modified_base 2: mod_base = OTHER; note = 2'O-methyl-adenosine
  modified_base 3: mod_base = um
  modified_base 4: mod_base = cm
  modified_base 5: mod_base = cm
  modified_base 6: mod_base = OTHER; note = 2'O-methyl-adenosine
  modified_base 7: mod_base = OTHER; note = 2'-Fluoro-adenosine
  modified_base 8: mod_base = gm
  modified_base 9: mod_base = OTHER; note = 2'-Fluoro-adenosine
  modified_base 10: mod_base = OTHER; note = 2' Fluoro-guanosine
  modified_base 11: mod_base = OTHER; note = 2' Fluoro-guanosine
  modified_base 12: mod_base = um
  modified_base 13: mod_base = OTHER; note = 2'O-methyl-adenosine
  modified_base 14: mod_base = um
  modified_base 15: mod_base = um
  modified_base 16: mod_base = um
  modified_base 17: mod_base = um
  modified_base 18: mod_base = gm
  modified_base 19: mod_base = OTHER; note = 2'O-methyl-adenosine
  modified_base 20: mod_base = um
  modified_base 21: mod_base = OTHER; note = 2'O-methyl-adenosine
  modified_base 1^2: mod_base = OTHER; note = phosphorothioate linkage
  modified_base 2^3: mod_base = OTHER; note = phosphorothioate linkage
tatccaagaggtattttgata

SEQ ID NO: 627 - RNA, 21 nt, synthetic construct
  source 1..21: mol_type = other RNA
  misc_feature 1..21: note = Description: ZPI siRNA sense strand: ETXS761; corresponding to SEQ ID NO: 307
  modified_base 1: mod_base = OTHER; note = 2'O-methyl-adenosine
  modified_base 2: mod_base = OTHER; note = 2'O-methyl-adenosine
  modified_base 3: mod_base = OTHER; note = 2'O-methyl-adenosine
  modified_base 4: mod_base = um
  modified_base 5: mod_base = gm
  modified_base 6: mod_base = cm
  modified_base 7: mod_base = OTHER; note = 2' Fluoro-cytidine
  modified_base 8: mod_base = OTHER; note = 2'O-methyl-adenosine
  modified_base 9: mod_base = OTHER; note = 2' Fluoro-cytidine
  modified_base 10: mod_base = OTHER; note = 2' Fluoro-cytidine
  modified_base 11: mod_base = OTHER; note = 2'-Fluoro-adenosine
  modified_base 12: mod_base = um
  modified_base 13: mod_base = gm
  modified_base 14: mod_base = cm
  modified_base 15: mod_base = um
  modified_base 16: mod_base = gm
  modified_base 17: mod_base = gm
  modified_base 18: mod_base = um
  modified_base 19: mod_base = gm
  modified_base 20: mod_base = gm
  modified_base 21: mod_base = um
  modified_base 1^2: mod_base = OTHER; note = phosphorothioate linkage
  modified_base 2^3: mod_base = OTHER; note = phosphorothioate linkage
aaatgccaccatgctggtggt

SEQ ID NO: 628 - RNA, 21 nt, synthetic construct
  source 1..21: mol_type = other RNA
  misc_feature 1..21: note = Description: ZPI siRNA sense strand: ETXS763; corresponding to SEQ ID NO: 308
  modified_base 1: mod_base = OTHER; note = 2'O-methyl-adenosine
  modified_base 2: mod_base = um
  modified_base 3: mod_base = um
  modified_base 4: mod_base = OTHER; note = 2'O-methyl-adenosine
  modified_base 5: mod_base = cm
  modified_base 6: mod_base = OTHER; note = 2'O-methyl-adenosine
  modified_base 7: mod_base = OTHER; note = 2' Fluoro-uridine
  modified_base 8: mod_base = cm
  modified_base 9: mod_base = OTHER; note = 2' Fluoro-uridine
  modified_base 10: mod_base = OTHER; note = 2' Fluoro-uridine
  modified_base 11: mod_base = OTHER; note = 2' Fluoro-guanosine
  modified_base 12: mod_base = um
  modified_base 13: mod_base = um
  modified_base 14: mod_base = cm
  modified_base 15: mod_base = OTHER; note = 2'O-methyl-adenosine
  modified_base 16: mod_base = OTHER; note = 2'O-methyl-adenosine
  modified_base 17: mod_base = OTHER; note = 2'O-methyl-adenosine
  modified_base 18: mod_base = gm
  modified_base 19: mod_base = gm
  modified_base 20: mod_base = gm
  modified_base 21: mod_base = OTHER; note = 2'O-methyl-adenosine
  modified_base 1^2: mod_base = OTHER; note = phosphorothioate linkage
  modified_base 2^3: mod_base = OTHER; note = phosphorothioate linkage
attacatcttgttcaaaggga

SEQ ID NO: 629 - RNA, 21 nt, synthetic construct
  source 1..21: mol_type = other RNA
  misc_feature 1..21: note = Description: ZPI siRNA sense strand: ETXS765; corresponding to SEQ ID NO: 309
  modified_base 1: mod_base = cm
  modified_base 2: mod_base = um
  modified_base 3: mod_base = cm
  modified_base 4: mod_base = cm
  modified_base 5: mod_base = OTHER; note = 2'O-methyl-adenosine
  modified_base 6: mod_base = um
  modified_base 7: mod_base = OTHER; note = 2' Fluoro-guanosine
  modified_base 8: mod_base = OTHER; note = 2'O-methyl-adenosine
  modified_base 9: mod_base = OTHER; note = 2' Fluoro-guanosine
  modified_base 10: mod_base = OTHER; note = 2' Fluoro-guanosine
  modified_base 11: mod_base = OTHER; note = 2' Fluoro-cytidine
  modified_base 12: mod_base = OTHER; note = 2'O-methyl-adenosine
  modified_base 13: mod_base = cm
  modified_base 14: mod_base = gm
  modified_base 15: mod_base = OTHER; note = 2'O-methyl-adenosine
  modified_base 16: mod_base = um
  modified_base 17: mod_base = gm
  modified_base 18: mod_base = gm
  modified_base 19: mod_base = cm
  modified_base 20: mod_base = OTHER; note = 2'O-methyl-adenosine
  modified_base 21: mod_base = OTHER; note = 2'O-methyl-adenosine
  modified_base 1^2: mod_base = OTHER; note = phosphorothioate linkage
  modified_base 2^3: mod_base = OTHER; note = phosphorothioate linkage
ctccatgaggcacgatggcaa

SEQ ID NO: 630 - RNA, 21 nt, synthetic construct
  source 1..21: mol_type = other RNA
  misc_feature 1..21: note = Description: ZPI siRNA sense strand: ETXS767; corresponding to SEQ ID NO: 310
  modified_base 1: mod_base = um
  modified_base 2: mod_base = cm
  modified_base 3: mod_base = cm
  modified_base 4: mod_base = OTHER; note = 2'O-methyl-adenosine
  modified_base 5: mod_base = um
  modified_base 6: mod_base = gm
  modified_base 7: mod_base = OTHER; note = 2' Fluoro-cytidine
  modified_base 8: mod_base = cm
  modified_base 9: mod_base = OTHER; note = 2' Fluoro-uridine
  modified_base 10: mod_base = OTHER; note = 2' Fluoro-cytidine
  modified_base 11: mod_base = OTHER; note = 2' Fluoro-cytidine
  modified_base 12: mod_base = um
  modified_base 13: mod_base = gm
  modified_base 14: mod_base = um
  modified_base 15: mod_base = cm
  modified_base 16: mod_base = OTHER; note = 2'O-methyl-adenosine
  modified_base 17: mod_base = um
  modified_base 18: mod_base = cm
  modified_base 19: mod_base = OTHER; note = 2'O-methyl-adenosine
  modified_base 20: mod_base = OTHER; note = 2'O-methyl-adenosine
  modified_base 21: mod_base = OTHER; note = 2'O-methyl-adenosine
  modified_base 1^2: mod_base = OTHER; note = phosphorothioate linkage
  modified_base 2^3: mod_base = OTHER; note = phosphorothioate linkage
tccatgcctcctgtcatcaaa

SEQ ID NO: 631 - RNA, 21 nt, synthetic construct
  source 1..21: mol_type = other RNA
  misc_feature 1..21: note = Description: ZPI siRNA sense strand: ETXS769; corresponding to SEQ ID NO: 311
  modified_base 1: mod_base = OTHER; note = 2'O-methyl-adenosine
  modified_base 2: mod_base = um
  modified_base 3: mod_base = um
  modified_base 4: mod_base = cm
  modified_base 5: mod_base = cm
  modified_base 6: mod_base = OTHER; note = 2'O-methyl-adenosine
  modified_base 7: mod_base = OTHER; note = 2' Fluoro-uridine
  modified_base 8: mod_base = gm
  modified_base 9: mod_base = OTHER; note = 2' Fluoro-cytidine
  modified_base 10: mod_base = OTHER; note = 2' Fluoro-cytidine
  modified_base 11: mod_base = OTHER; note = 2' Fluoro-uridine
  modified_base 12: mod_base = cm
  modified_base 13: mod_base = cm
  modified_base 14: mod_base = um
  modified_base 15: mod_base = gm
  modified_base 16: mod_base = um
  modified_base 17: mod_base = cm
  modified_base 18: mod_base = OTHER; note = 2'O-methyl-adenosine
  modified_base 19: mod_base = um
  modified_base 20: mod_base = cm
  modified_base 21: mod_base = OTHER; note = 2'O-methyl-adenosine
  modified_base 1^2: mod_base = OTHER; note = phosphorothioate linkage
  modified_base 2^3: mod_base = OTHER; note = phosphorothioate linkage
attccatgcctcctgtcatca

SEQ ID NO: 632 - RNA, 21 nt, synthetic construct
  source 1..21: mol_type = other RNA
  misc_feature 1..21: note = Description: ZPI siRNA sense strand: ETXS771; corresponding to SEQ ID NO: 312
  modified_base 1: mod_base = cm
  modified_base 2: mod_base = OTHER; note = 2'O-methyl-adenosine
  modified_base 3: mod_base = OTHER; note = 2'O-methyl-adenosine
  modified_base 4: mod_base = gm
  modified_base 5: mod_base = gm
  modified_base 6: mod_base = OTHER; note = 2'O-methyl-adenosine
  modified_base 7: mod_base = OTHER; note = 2'-Fluoro-adenosine
  modified_base 8: mod_base = OTHER; note = 2'O-methyl-adenosine
  modified_base 9: mod_base = OTHER; note = 2' Fluoro-uridine
  modified_base 10: mod_base = OTHER; note = 2' Fluoro-guanosine
  modified_base 11: mod_base = OTHER; note = 2' Fluoro-cytidine
  modified_base 12: mod_base = cm
  modified_base 13: mod_base = OTHER; note = 2'O-methyl-adenosine
  modified_base 14: mod_base = cm
  modified_base 15: mod_base = cm
  modified_base 16: mod_base = OTHER; note = 2'O-methyl-adenosine
  modified_base 17: mod_base = um
  modified_base 18: mod_base = gm
  modified_base 19: mod_base = cm
  modified_base 20: mod_base = um
  modified_base 21: mod_base = gm
  modified_base 1^2: mod_base = OTHER; note = phosphorothioate linkage
  modified_base 2^3: mod_base = OTHER; note = phosphorothioate linkage
caaggaaatgccaccatgctg

SEQ ID NO: 633 - RNA, 21 nt, synthetic construct
  source 1..21: mol_type = other RNA
  misc_feature 1..21: note = Description: ZPI siRNA sense strand: ETXS773; corresponding to SEQ ID NO: 313
  modified_base 1: mod_base = um
  modified_base 2: mod_base = gm
  modified_base 3: mod_base = gm
  modified_base 4: mod_base = um
  modified_base 5: mod_base = gm
  modified_base 6: mod_base = gm
  modified_base 7: mod_base = OTHER; note = 2' Fluoro-uridine
  modified_base 8: mod_base = cm
  modified_base 9: mod_base = OTHER; note = 2' Fluoro-cytidine
  modified_base 10: mod_base = OTHER; note = 2' Fluoro-uridine
  modified_base 11: mod_base = OTHER; note = 2' Fluoro-cytidine
  modified_base 12: mod_base = OTHER; note = 2'O-methyl-adenosine
  modified_base 13: mod_base = um
  modified_base 14: mod_base = gm
  modified_base 15: mod_base = gm
  modified_base 16: mod_base = OTHER; note = 2'O-methyl-adenosine
  modified_base 17: mod_base = gm
  modified_base 18: mod_base = OTHER; note = 2'O-methyl-adenosine
  modified_base 19: mod_base = OTHER; note = 2'O-methyl-adenosine
  modified_base 20: mod_base = OTHER; note = 2'O-methyl-adenosine
  modified_base 21: mod_base = OTHER; note = 2'O-methyl-adenosine
  modified_base 1^2: mod_base = OTHER; note = phosphorothioate linkage
  modified_base 2^3: mod_base = OTHER; note = phosphorothioate linkage
tggtggtcctcatggagaaaa

SEQ ID NO: 634 - RNA, 21 nt, synthetic construct
  source 1..21: mol_type = other RNA
  misc_feature 1..21: note = Description: ZPI siRNA sense strand: ETXS775; corresponding to SEQ ID NO: 314
  modified_base 1: mod_base = OTHER; note = 2'O-methyl-adenosine
  modified_base 2: mod_base = um
  modified_base 3: mod_base = cm
  modified_base 4: mod_base = um
  modified_base 5: mod_base = um
  modified_base 6: mod_base = gm
  modified_base 7: mod_base = OTHER; note = 2' Fluoro-uridine
  modified_base 8: mod_base = um
  modified_base 9: mod_base = OTHER; note = 2' Fluoro-cytidine
  modified_base 10: mod_base = OTHER; note = 2'-Fluoro-adenosine
  modified_base 11: mod_base = OTHER; note = 2'-Fluoro-adenosine
  modified_base 12: mod_base = OTHER; note = 2'O-methyl-adenosine
  modified_base 13: mod_base = gm
  modified_base 14: mod_base = gm
  modified_base 15: mod_base = gm
  modified_base 16: mod_base = OTHER; note = 2'O-methyl-adenosine
  modified_base 17: mod_base = OTHER; note = 2'O-methyl-adenosine
  modified_base 18: mod_base = OTHER; note = 2'O-methyl-adenosine
  modified_base 19: mod_base = um
  modified_base 20: mod_base = gm
  modified_base 21: mod_base = gm
  modified_base 1^2: mod_base = OTHER; note = phosphorothioate linkage
  modified_base 2^3: mod_base = OTHER; note = phosphorothioate linkage
atcttgttcaaagggaaatgg

SEQ ID NO: 635 - RNA, 21 nt, synthetic construct
  source 1..21: mol_type = other RNA
  misc_feature 1..21: note = Description: ZPI siRNA sense strand: ETXS777; corresponding to SEQ ID NO: 315
  modified_base 1: mod_base = OTHER; note = 2'O-methyl-adenosine
  modified_base 2: mod_base = OTHER; note = 2'O-methyl-adenosine
  modified_base 3: mod_base = gm
  modified_base 4: mod_base = gm
  modified_base 5: mod_base = OTHER; note = 2'O-methyl-adenosine
  modified_base 6: mod_base = OTHER; note = 2'O-methyl-adenosine
  modified_base 7: mod_base = OTHER; note = 2'-Fluoro-adenosine
  modified_base 8: mod_base = um
  modified_base 9: mod_base = OTHER; note = 2' Fluoro-guanosine
  modified_base 10: mod_base = OTHER; note = 2' Fluoro-cytidine
  modified_base 11: mod_base = OTHER; note = 2' Fluoro-cytidine
  modified_base 12: mod_base = OTHER; note = 2'O-methyl-adenosine
  modified_base 13: mod_base = cm
  modified_base 14: mod_base = cm
  modified_base 15: mod_base = OTHER; note = 2'O-methyl-adenosine
  modified_base 16: mod_base = um
  modified_base 17: mod_base = gm
  modified_base 18: mod_base = cm
  modified_base 19: mod_base = um
  modified_base 20: mod_base = gm
  modified_base 21: mod_base = gm
  modified_base 1^2: mod_base = OTHER; note = phosphorothioate linkage
  modified_base 2^3: mod_base = OTHER; note = phosphorothioate linkage
aaggaaatgccaccatgctgg

SEQ ID NO: 636 - RNA, 21 nt, synthetic construct
  source 1..21: mol_type = other RNA
  misc_feature 1..21: note = Description: ZPI siRNA sense strand: ETXS779; corresponding to SEQ ID NO: 316
  modified_base 1: mod_base = gm
  modified_base 2: mod_base = cm
  modified_base 3: mod_base = cm
  modified_base 4: mod_base = um
  modified_base 5: mod_base = cm
  modified_base 6: mod_base = cm
  modified_base 7: mod_base = OTHER; note = 2'-Fluoro-adenosine
  modified_base 8: mod_base = cm
  modified_base 9: mod_base = OTHER; note = 2' Fluoro-cytidine
  modified_base 10: mod_base = OTHER; note = 2' Fluoro-uridine
  modified_base 11: mod_base = OTHER; note = 2' Fluoro-uridine
  modified_base 12: mod_base = um
  modified_base 13: mod_base = gm
  modified_base 14: mod_base = OTHER; note = 2'O-methyl-adenosine
  modified_base 15: mod_base = cm
  modified_base 16: mod_base = OTHER; note = 2'O-methyl-adenosine
  modified_base 17: mod_base = OTHER; note = 2'O-methyl-adenosine
  modified_base 18: mod_base = gm
  modified_base 19: mod_base = OTHER; note = 2'O-methyl-adenosine
  modified_base 20: mod_base = OTHER; note = 2'O-methyl-adenosine
  modified_base 21: mod_base = um
  modified_base 1^2: mod_base = OTHER; note = phosphorothioate linkage
  modified_base 2^3: mod_base = OTHER; note = phosphorothioate linkage
gcctccacctttgacaagaat

SEQ ID NO: 637 - RNA, 21 nt, synthetic construct
  source 1..21: mol_type = other RNA
  misc_feature 1..21: note = Description: ZPI siRNA sense strand: ETXS781; corresponding to SEQ ID NO: 317
  modified_base 1: mod_base = gm
  modified_base 2: mod_base = OTHER; note = 2'O-methyl-adenosine
  modified_base 3: mod_base = gm
  modified_base 4: mod_base = um
  modified_base 5: mod_base = um
  modified_base 6: mod_base = um
  modified_base 7: mod_base = OTHER; note = 2' Fluoro-uridine
  modified_base 8: mod_base = gm
  modified_base 9: mod_base = OTHER; note = 2' Fluoro-cytidine
  modified_base 10: mod_base = OTHER; note = 2' Fluoro-cytidine
  modified_base 11: mod_base = OTHER; note = 2' Fluoro-uridine
  modified_base 12: mod_base = um
  modified_base 13: mod_base = cm
  modified_base 14: mod_base = OTHER; note = 2'O-methyl-adenosine
  modified_base 15: mod_base = um
  modified_base 16: mod_base = cm
  modified_base 17: mod_base = cm
  modified_base 18: mod_base = OTHER; note = 2'O-methyl-adenosine
  modified_base 19: mod_base = cm
  modified_base 20: mod_base = OTHER; note = 2'O-methyl-adenosine
  modified_base 21: mod_base = OTHER; note = 2'O-methyl-adenosine
  modified_base 1^2: mod_base = OTHER; note = phosphorothioate linkage
  modified_base 2^3: mod_base = OTHER; note = phosphorothioate linkage
gagttttgccttcatccacaa

SEQ ID NO: 638 - RNA, 21 nt, synthetic construct
  source 1..21: mol_type = other RNA
  misc_feature 1..21: note = Description: ZPI siRNA sense strand: ETXS783; corresponding to SEQ ID NO: 318
  modified_base 1: mod_base = gm
  modified_base 2: mod_base = cm
  modified_base 3: mod_base = um
  modified_base 4: mod_base = gm
  modified_base 5: mod_base = cm
  modified_base 6: mod_base = gm
  modified_base 7: mod_base = OTHER; note = 2'-Fluoro-adenosine
  modified_base 8: mod_base = OTHER; note = 2'O-methyl-adenosine
  modified_base 9: mod_base = OTHER; note = 2'-Fluoro-adenosine
  modified_base 10: mod_base = OTHER; note = 2' Fluoro-guanosine
  modified_base 11: mod_base = OTHER; note = 2'-Fluoro-adenosine
  modified_base 12: mod_base = um
  modified_base 13: mod_base = cm
  modified_base 14: mod_base = um
  modified_base 15: mod_base = cm
  modified_base 16: mod_base = cm
  modified_base 17: mod_base = OTHER; note = 2'O-methyl-adenosine
  modified_base 18: mod_base = um
  modified_base 19: mod_base = gm
  modified_base 20: mod_base = OTHER; note = 2'O-methyl-adenosine
  modified_base 21: mod_base = gm
  modified_base 1^2: mod_base = OTHER; note = phosphorothioate linkage
  modified_base 2^3: mod_base = OTHER; note = phosphorothioate linkage
gctgcgaaagatctccatgag

SEQ ID NO: 639 - RNA, 21 nt, synthetic construct
  source 1..21: mol_type = other RNA
  misc_feature 1..21: note = Description: ZPI siRNA sense strand: ETXS785; corresponding to SEQ ID NO: 319
  modified_base 1: mod_base = OTHER; note = 2'O-methyl-adenosine
  modified_base 2: mod_base = gm
  modified_base 3: mod_base = um
  modified_base 4: mod_base = um
  modified_base 5: mod_base = um
  modified_base 6: mod_base = gm
  modified_base 7: mod_base = OTHER; note = 2' Fluoro-cytidine
  modified_base 8: mod_base = cm
  modified_base 9: mod_base = OTHER; note = 2' Fluoro-uridine
  modified_base 10: mod_base = OTHER; note = 2' Fluoro-cytidine
  modified_base 11: mod_base = OTHER; note = 2' Fluoro-cytidine
  modified_base 12: mod_base = OTHER; note = 2'O-methyl-adenosine
  modified_base 13: mod_base = cm
  modified_base 14: mod_base = cm
  modified_base 15: mod_base = um
  modified_base 16: mod_base = um
  modified_base 17: mod_base = um
  modified_base 18: mod_base = gm
  modified_base 19: mod_base = OTHER; note = 2'O-methyl-adenosine
  modified_base 20: mod_base = cm
  modified_base 21: mod_base = OTHER; note = 2'O-methyl-adenosine
  modified_base 1^2: mod_base = OTHER; note = phosphorothioate linkage
  modified_base 2^3: mod_base = OTHER; note = phosphorothioate linkage
agtttgcctccacctttgaca

SEQ ID NO: 640 - RNA, 21 nt, synthetic construct
  source 1..21: mol_type = other RNA
  misc_feature 1..21: note = Description: ZPI siRNA sense strand: ETXS787; corresponding to SEQ ID NO: 320
  modified_base 1: mod_base = gm
  modified_base 2: mod_base = um
  modified_base 3: mod_base = um
  modified_base 4: mod_base = um
  modified_base 5: mod_base = gm
  modified_base 6: mod_base = cm
  modified_base 7: mod_base = OTHER; note = 2' Fluoro-cytidine
  modified_base 8: mod_base = um
  modified_base 9: mod_base = OTHER; note = 2' Fluoro-cytidine
  modified_base 10: mod_base = OTHER; note = 2' Fluoro-cytidine
  modified_base 11: mod_base = OTHER; note = 2'-Fluoro-adenosine
  modified_base 12: mod_base = cm
  modified_base 13: mod_base = cm
  modified_base 14: mod_base = um
  modified_base 15: mod_base = um
  modified_base 16: mod_base = um
  modified_base 17: mod_base = gm
  modified_base 18: mod_base = OTHER; note = 2'O-methyl-adenosine
  modified_base 19: mod_base = cm
  modified_base 20: mod_base = OTHER; note = 2'O-methyl-adenosine
  modified_base 21: mod_base = OTHER; note = 2'O-methyl-adenosine
  modified_base 1^2: mod_base = OTHER; note = phosphorothioate linkage
  modified_base 2^3: mod_base = OTHER; note = phosphorothioate linkage
gtttgcctccacctttgacaa

SEQ ID NO: 641 - RNA, 21 nt, synthetic construct
  source 1..21: mol_type = other RNA
  misc_feature 1..21: note = Description: ZPI siRNA sense strand: ETXS789; corresponding to SEQ ID NO: 321
  modified_base 1: mod_base = cm
  modified_base 2: mod_base = OTHER; note = 2'O-methyl-adenosine
  modified_base 3: mod_base = um
  modified_base 4: mod_base = cm
  modified_base 5: mod_base = um
  modified_base 6: mod_base = um
  modified_base 7: mod_base = OTHER; note = 2' Fluoro-guanosine
  modified_base 8: mod_base = um
  modified_base 9: mod_base = OTHER; note = 2' Fluoro-uridine
  modified_base 10: mod_base = OTHER; note = 2' Fluoro-cytidine
  modified_base 11: mod_base = OTHER; note = 2'-Fluoro-adenosine
  modified_base 12: mod_base = OTHER; note = 2'O-methyl-adenosine
  modified_base 13: mod_base = OTHER; note = 2'O-methyl-adenosine
  modified_base 14: mod_base = gm
  modified_base 15: mod_base = gm
  modified_base 16: mod_base = gm
  modified_base 17: mod_base = OTHER; note = 2'O-methyl-adenosine
  modified_base 18: mod_base = OTHER; note = 2'O-methyl-adenosine
  modified_base 19: mod_base = OTHER; note = 2'O-methyl-adenosine
  modified_base 20: mod_base = um
  modified_base 21: mod_base = gm
  modified_base 1^2: mod_base = OTHER; note = phosphorothioate linkage
  modified_base 2^3: mod_base = OTHER; note = phosphorothioate linkage
catcttgttcaaagggaaatg

SEQ ID NO: 642 - RNA, 21 nt, synthetic construct
  source 1..21: mol_type = other RNA
  misc_feature 1..21: note = Description: ZPI siRNA sense strand: ETXS791; corresponding to SEQ ID NO: 322
  modified_base 1: mod_base = gm
  modified_base 2: mod_base = gm
  modified_base 3: mod_base = OTHER; note = 2'O-methyl-adenosine
  modified_base 4: mod_base = gm
  modified_base 5: mod_base = um
  modified_base 6: mod_base = um
  modified_base 7: mod_base = OTHER; note = 2' Fluoro-uridine
  modified_base 8: mod_base = um
  modified_base 9: mod_base = OTHER; note = 2' Fluoro-guanosine
  modified_base 10: mod_base = OTHER; note = 2' Fluoro-cytidine
  modified_base 11: mod_base = OTHER; note = 2' Fluoro-cytidine
  modified_base 12: mod_base = um
  modified_base 13: mod_base = um
  modified_base 14: mod_base = cm
  modified_base 15: mod_base = OTHER; note = 2'O-methyl-adenosine
  modified_base 16: mod_base = um
  modified_base 17: mod_base = cm
  modified_base 18: mod_base = cm
  modified_base 19: mod_base = OTHER; note = 2'O-methyl-adenosine
  modified_base 20: mod_base = cm
  modified_base 21: mod_base = OTHER; note = 2'O-methyl-adenosine
  modified_base 1^2: mod_base = OTHER; note = phosphorothioate linkage
  modified_base 2^3: mod_base = OTHER; note = phosphorothioate linkage
ggagttttgccttcatccaca

SEQ ID NO: 643 - RNA, 21 nt, synthetic construct
  source 1..21: mol_type = other RNA
  misc_feature 1..21: note = Description: ZPI siRNA sense strand: ETXS793; corresponding to SEQ ID NO: 323
  modified_base 1: mod_base = cm
  modified_base 2: mod_base = um
  modified_base 3: mod_base = gm
  modified_base 4: mod_base = cm
  modified_base 5: mod_base = gm
  modified_base 6: mod_base = OTHER; note = 2'O-methyl-adenosine
  modified_base 7: mod_base = OTHER; note = 2'-Fluoro-adenosine
  modified_base 8: mod_base = OTHER; note = 2'O-methyl-adenosine
  modified_base 9: mod_base = OTHER; note = 2' Fluoro-guanosine
  modified_base 10: mod_base = OTHER; note = 2'-Fluoro-adenosine
  modified_base 11: mod_base = OTHER; note = 2' Fluoro-uridine
  modified_base 12: mod_base = cm
  modified_base 13: mod_base = um
  modified_base 14: mod_base = cm
  modified_base 15: mod_base = cm
  modified_base 16: mod_base = OTHER; note = 2'O-methyl-adenosine
  modified_base 17: mod_base = um
  modified_base 18: mod_base = gm
  modified_base 19: mod_base = OTHER; note = 2'O-methyl-adenosine
  modified_base 20: mod_base = gm
  modified_base 21: mod_base = gm
  modified_base 1^2: mod_base = OTHER; note = phosphorothioate linkage
  modified_base 2^3: mod_base = OTHER; note = phosphorothioate linkage
ctgcgaaagatctccatgagg

SEQ ID NO: 644 - RNA, 21 nt, synthetic construct
  source 1..21: mol_type = other RNA
  misc_feature 1..21: note = Description: ZPI siRNA sense strand: ETXS795; corresponding to SEQ ID NO: 324
  modified_base 1: mod_base = cm
  modified_base 2: mod_base = cm
  modified_base 3: mod_base = OTHER; note = 2'O-methyl-adenosine
  modified_base 4: mod_base = um
  modified_base 5: mod_base = gm
  modified_base 6: mod_base = cm
  modified_base 7: mod_base = OTHER; note = 2' Fluoro-cytidine
  modified_base 8: mod_base = um
  modified_base 9: mod_base = OTHER; note = 2' Fluoro-cytidine
  modified_base 10: mod_base = OTHER; note = 2' Fluoro-cytidine
  modified_base 11: mod_base = OTHER; note = 2' Fluoro-uridine
  modified_base 12: mod_base = gm
  modified_base 13: mod_base = um
  modified_base 14: mod_base = cm
  modified_base 15: mod_base = OTHER; note = 2'O-methyl-adenosine
  modified_base 16: mod_base = um
  modified_base 17: mod_base = cm
  modified_base 18: mod_base = OTHER; note = 2'O-methyl-adenosine
  modified_base 19: mod_base = OTHER; note = 2'O-methyl-adenosine
  modified_base 20: mod_base = OTHER; note = 2'O-methyl-adenosine
  modified_base 21: mod_base = gm
  modified_base 1^2: mod_base = OTHER; note = phosphorothioate linkage
  modified_base 2^3: mod_base = OTHER; note = phosphorothioate linkage
ccatgcctcctgtcatcaaag

SEQ ID NO: 645 - RNA, 21 nt, synthetic construct
  source 1..21: mol_type = other RNA
  misc_feature 1..21: note = Description: ZPI siRNA sense strand: ETXS797; corresponding to SEQ ID NO: 325
  modified_base 1: mod_base = um
  modified_base 2: mod_base = gm
  modified_base 3: mod_base = um
  modified_base 4: mod_base = um
  modified_base 5: mod_base = um
  modified_base 6: mod_base = cm
  modified_base 7: mod_base = OTHER; note = 2' Fluoro-uridine
  modified_base 8: mod_base = gm
  modified_base 9: mod_base = OTHER; note = 2' Fluoro-guanosine
  modified_base 10: mod_base = OTHER; note = 2' Fluoro-guanosine
  modified_base 11: mod_base = OTHER; note = 2' Fluoro-cytidine
  modified_base 12: mod_base = OTHER; note = 2'O-methyl-adenosine
  modified_base 13: mod_base = gm
  modified_base 14: mod_base = gm
  modified_base 15: mod_base = gm
  modified_base 16: mod_base = um
  modified_base 17: mod_base = gm
  modified_base 18: mod_base = gm
  modified_base 19: mod_base = um
  modified_base 20: mod_base = gm
  modified_base 21: mod_base = OTHER; note = 2'O-methyl-adenosine
  modified_base 1^2: mod_base = OTHER; note = phosphorothioate linkage
  modified_base 2^3: mod_base = OTHER; note = phosphorothioate linkage
tgtttctgggcagggtggtga

SEQ ID NO: 646 - RNA, 21 nt, synthetic construct
  source 1..21: mol_type = other RNA
  misc_feature 1..21: note = Description: ZPI siRNA sense strand: ETXS799; corresponding to SEQ ID NO: 326
  modified_base 1: mod_base = gm
  modified_base 2: mod_base = cm
  modified_base 3: mod_base = cm
  modified_base 4: mod_base = um
  modified_base 5: mod_base = gm
  modified_base 6: mod_base = cm
  modified_base 7: mod_base = OTHER; note = 2' Fluoro-uridine
  modified_base 8: mod_base = gm
  modified_base 9: mod_base = OTHER; note = 2' Fluoro-cytidine
  modified_base 10: mod_base = OTHER; note = 2' Fluoro-guanosine
  modified_base 11: mod_base = OTHER; note = 2'-Fluoro-adenosine
  modified_base 12: mod_base = OTHER; note = 2'O-methyl-adenosine
  modified_base 13: mod_base = OTHER; note = 2'O-methyl-adenosine
  modified_base 14: mod_base = gm
  modified_base 15: mod_base = OTHER; note = 2'O-methyl-adenosine
  modified_base 16: mod_base = um
  modified_base 17: mod_base = cm
  modified_base 18: mod_base = um
  modified_base 19: mod_base = cm
  modified_base 20: mod_base = cm
  modified_base 21: mod_base = OTHER; note = 2'O-methyl-adenosine
  modified_base 1^2: mod_base = OTHER; note = phosphorothioate linkage
  modified_base 2^3: mod_base = OTHER; note = phosphorothioate linkage
gcctgctgcgaaagatctcca

SEQ ID NO: 647 - RNA, 21 nt, synthetic construct
  source 1..21: mol_type = other RNA
  misc_feature 1..21: note = Description: ZPI siRNA sense strand: ETXS801; corresponding to SEQ ID NO: 327
  modified_base 1: mod_base = OTHER; note = 2'O-methyl-adenosine
  modified_base 2: mod_base = OTHER; note = 2'O-methyl-adenosine
  modified_base 3: mod_base = cm
  modified_base 4: mod_base = um
  modified_base 5: mod_base = gm
  modified_base 6: mod_base = um
  modified_base 7: mod_base = OTHER; note = 2' Fluoro-uridine
  modified_base 8: mod_base = um
  modified_base 9: mod_base = OTHER; note = 2' Fluoro-guanosine
  modified_base 10: mod_base = OTHER; note = 2'-Fluoro-adenosine
  modified_base 11: mod_base = OTHER; note = 2' Fluoro-uridine
  modified_base 12: mod_base = gm
  modified_base 13: mod_base = OTHER; note = 2'O-methyl-adenosine
  modified_base 14: mod_base = gm
  modified_base 15: mod_base = OTHER; note = 2'O-methyl-adenosine
  modified_base 16: mod_base = um
  modified_base 17: mod_base = um
  modified_base 18: mod_base = OTHER; note = 2'O-methyl-adenosine
  modified_base 19: mod_base = OTHER; note = 2'O-methyl-adenosine
  modified_base 20: mod_base = um
  modified_base 21: mod_base = cm
  modified_base 1^2: mod_base = OTHER; note = phosphorothioate linkage
  modified_base 2^3: mod_base = OTHER; note = phosphorothioate linkage
aactgtttgatgagattaatc

SEQ ID NO: 648 - RNA, 21 nt, synthetic construct
  source 1..21: mol_type = other RNA
  misc_feature 1..21: note = Description: ZPI siRNA sense strand: ETXS803; corresponding to SEQ ID NO: 328
  modified_base 1: mod_base = OTHER; note = 2'O-methyl-adenosine
  modified_base 2: mod_base = um
  modified_base 3: mod_base = gm
  modified_base 4: mod_base = cm
  modified_base 5: mod_base = cm
  modified_base 6: mod_base = um
  modified_base 7: mod_base = OTHER; note = 2' Fluoro-cytidine
  modified_base 8: mod_base = cm
  modified_base 9: mod_base = OTHER; note = 2' Fluoro-uridine
  modified_base 10: mod_base = OTHER; note = 2' Fluoro-guanosine
  modified_base 11: mod_base = OTHER; note = 2' Fluoro-uridine
  modified_base 12: mod_base = cm
  modified_base 13: mod_base = OTHER; note = 2'O-methyl-adenosine
  modified_base 14: mod_base = um
  modified_base 15: mod_base = cm
  modified_base 16: mod_base = OTHER; note = 2'O-methyl-adenosine
  modified_base 17: mod_base = OTHER; note = 2'O-methyl-adenosine
  modified_base 18: mod_base = OTHER; note = 2'O-methyl-adenosine
  modified_base 19: mod_base = gm
  modified_base 20: mod_base = um
  modified_base 21: mod_base = gm
  modified_base 1^2: mod_base = OTHER; note = phosphorothioate linkage
  modified_base 2^3: mod_base = OTHER; note = phosphorothioate linkage
atgcctcctgtcatcaaagtg

SEQ ID NO: 649 - RNA, 21 nt, synthetic construct
  source 1..21: mol_type = other RNA
  misc_feature 1..21: note = Description: ZPI siRNA sense strand: ETXS805; corresponding to SEQ ID NO: 329
  modified_base 1: mod_base = OTHER; note = 2'O-methyl-adenosine
  modified_base 2: mod_base = gm
  modified_base 3: mod_base = um
  modified_base 4: mod_base = OTHER; note = 2'O-methyl-adenosine
  modified_base 5: mod_base = um
  modified_base 6: mod_base = gm
  modified_base 7: mod_base = OTHER; note = 2'-Fluoro-adenosine
  modified_base 8: mod_base = gm
  modified_base 9: mod_base = OTHER; note = 2'-Fluoro-adenosine
  modified_base 10: mod_base = OTHER; note = 2' Fluoro-uridine
  modified_base 11: mod_base = OTHER; note = 2' Fluoro-guanosine
  modified_base 12: mod_base = cm
  modified_base 13: mod_base = OTHER; note = 2'O-methyl-adenosine
  modified_base 14: mod_base = um
  modified_base 15: mod_base = gm
  modified_base 16: mod_base = OTHER; note = 2'O-methyl-adenosine
  modified_base 17: mod_base = gm
  modified_base 18: mod_base = cm
  modified_base 19: mod_base = um
  modified_base 20: mod_base = gm
  modified_base 21: mod_base = cm
  modified_base 1^2: mod_base = OTHER; note = phosphorothioate linkage
  modified_base 2^3: mod_base = OTHER; note = phosphorothioate linkage
agtatgagatgcatgagctgc

SEQ ID NO: 650 - RNA, 21 nt, synthetic construct
  source 1..21: mol_type = other RNA
  misc_feature 1..21: note = Description: ZPI siRNA sense strand: ETXS807; corresponding to SEQ ID NO: 330
  modified_base 1: mod_base = OTHER; note = 2'O-methyl-adenosine
  modified_base 2: mod_base = OTHER; note = 2'O-methyl-adenosine
  modified_base 3: mod_base = gm
  modified_base 4: mod_base = um
  modified_base 5: mod_base = OTHER; note = 2'O-methyl-adenosine
  modified_base 6: mod_base = um
  modified_base 7: mod_base = OTHER; note = 2' Fluoro-guanosine
  modified_base 8: mod_base = OTHER; note = 2'O-methyl-adenosine
  modified_base 9: mod_base = OTHER; note = 2' Fluoro-guanosine
  modified_base 10: mod_base = OTHER; note = 2'-Fluoro-adenosine
  modified_base 11: mod_base = OTHER; note = 2' Fluoro-uridine
  modified_base 12: mod_base = gm
  modified_base 13: mod_base = cm
  modified_base 14: mod_base = OTHER; note = 2'O-methyl-adenosine
  modified_base 15: mod_base = um
  modified_base 16: mod_base = gm
  modified_base 17: mod_base = OTHER; note = 2'O-methyl-adenosine
  modified_base 18: mod_base = gm
  modified_base 19: mod_base = cm
  modified_base 20: mod_base = um
  modified_base 21: mod_base = gm
  modified_base 1^2: mod_base = OTHER; note = phosphorothioate linkage
  modified_base 2^3: mod_base = OTHER; note = phosphorothioate linkage
aagtatgagatgcatgagctg

SEQ ID NO: 651 - RNA, 21 nt, synthetic construct
  source 1..21: mol_type = other RNA
  misc_feature 1..21: note = Description: ZPI siRNA sense strand: ETXS809; corresponding to SEQ ID NO: 331
  modified_base 1: mod_base = um
  modified_base 2: mod_base = gm
  modified_base 3: mod_base = um
  modified_base 4: mod_base = cm
  modified_base 5: mod_base = cm
  modified_base 6: mod_base = um
  modified_base 7: mod_base = OTHER; note = 2' Fluoro-cytidine
  modified_base 8: mod_base = OTHER; note = 2'O-methyl-adenosine
  modified_base 9: mod_base = OTHER; note = 2'-Fluoro-adenosine
  modified_base 10: mod_base = OTHER; note = 2'-Fluoro-adenosine
  modified_base 11: mod_base = OTHER; note = 2' Fluoro-cytidine
  modified_base 12: mod_base = um
  modified_base 13: mod_base = gm
  modified_base 14: mod_base = cm
  modified_base 15: mod_base = cm
  modified_base 16: mod_base = cm
  modified_base 17: mod_base = um
  modified_base 18: mod_base = OTHER; note = 2'O-methyl-adenosine
  modified_base 19: mod_base = cm
  modified_base 20: mod_base = cm
  modified_base 21: mod_base = OTHER; note = 2'O-methyl-adenosine
  modified_base 1^2: mod_base = OTHER; note = phosphorothioate linkage
  modified_base 2^3: mod_base = OTHER; note = phosphorothioate linkage
tgtcctcaaactgccctacca

SEQ ID NO: 652 - RNA, 21 nt, synthetic construct
  source 1..21: mol_type = other RNA
  misc_feature 1..21: note = Description: ZPI siRNA sense strand: ETXS811; corresponding to SEQ ID NO: 332
  modified_base 1: mod_base = OTHER; note = 2'O-methyl-adenosine
  modified_base 2: mod_base = cm
  modified_base 3: mod_base = um
  modified_base 4: mod_base = gm
  modified_base 5: mod_base = um
  modified_base 6: mod_base = um
  modified_base 7: mod_base = OTHER; note = 2' Fluoro-uridine
  modified_base 8: mod_base = gm
  modified_base 9: mod_base = OTHER; note = 2'-Fluoro-adenosine
  modified_base 10: mod_base = OTHER; note = 2' Fluoro-uridine
  modified_base 11: mod_base = OTHER; note = 2' Fluoro-guanosine
  modified_base 12: mod_base = OTHER; note = 2'O-methyl-adenosine
  modified_base 13: mod_base = gm
  modified_base 14: mod_base = OTHER; note = 2'O-methyl-adenosine
  modified_base 15: mod_base = um
  modified_base 16: mod_base = um
  modified_base 17: mod_base = OTHER; note = 2'O-methyl-adenosine
  modified_base 18: mod_base = OTHER; note = 2'O-methyl-adenosine
  modified_base 19: mod_base = um
  modified_base 20: mod_base = cm
  modified_base 21: mod_base = cm
  modified_base 1^2: mod_base = OTHER; note = phosphorothioate linkage
  modified_base 2^3: mod_base = OTHER; note = phosphorothioate linkage
actgtttgatgagattaatcc

SEQ ID NO: 653 - RNA, 21 nt, synthetic construct
  source 1..21: mol_type = other RNA
  misc_feature 1..21: note = Description: ZPI siRNA sense strand: ETXS813; corresponding to SEQ ID NO: 333
  modified_base 1: mod_base = gm
  modified_base 2: mod_base = OTHER; note = 2'O-methyl-adenosine
  modified_base 3: mod_base = cm
  modified_base 4: mod_base = cm
  modified_base 5: mod_base = OTHER; note = 2'O-methyl-adenosine
  modified_base 6: mod_base = um
  modified_base 7: mod_base = OTHER; note = 2' Fluoro-uridine
  modified_base 8: mod_base = OTHER; note = 2'O-methyl-adenosine
  modified_base 9: mod_base = OTHER; note = 2'-Fluoro-adenosine
  modified_base 10: mod_base = OTHER; note = 2' Fluoro-guanosine
  modified_base 11: mod_base = OTHER; note = 2' Fluoro-guanosine
  modified_base 12: mod_base = um
  modified_base 13: mod_base = gm
  modified_base 14: mod_base = cm
  modified_base 15: mod_base = cm
  modified_base 16: mod_base = cm
  modified_base 17: mod_base = OTHER; note = 2'O-methyl-adenosine
  modified_base 18: mod_base = um
  modified_base 19: mod_base = gm
  modified_base 20: mod_base = OTHER; note = 2'O-methyl-adenosine
  modified_base 21: mod_base = um
  modified_base 1^2: mod_base = OTHER; note = phosphorothioate linkage
  modified_base 2^3: mod_base = OTHER; note = phosphorothioate linkage
gaccattaaggtgcccatgat

SEQ ID NO: 654 - RNA, 21 nt, synthetic construct
  source 1..21: mol_type = other RNA
  misc_feature 1..21: note = Description: ZPI siRNA sense strand: ETXS815; corresponding to SEQ ID NO: 334
  modified_base 1: mod_base = OTHER; note = 2'O-methyl-adenosine
  modified_base 2: mod_base = cm
  modified_base 3: mod_base = cm
  modified_base 4: mod_base = OTHER; note = 2'O-methyl-adenosine
  modified_base 5: mod_base = um
  modified_base 6: mod_base = um
  modified_base 7: mod_base = OTHER; note = 2'-Fluoro-adenosine
  modified_base 8: mod_base = OTHER; note = 2'O-methyl-adenosine
  modified_base 9: mod_base = OTHER; note = 2' Fluoro-guanosine
  modified_base 10: mod_base = OTHER; note = 2' Fluoro-guanosine
  modified_base 11: mod_base = OTHER; note = 2' Fluoro-uridine
  modified_base 12: mod_base = gm
  modified_base 13: mod_base = cm
  modified_base 14: mod_base = cm
  modified_base 15: mod_base = cm
  modified_base 16: mod_base = OTHER; note = 2'O-methyl-adenosine
  modified_base 17: mod_base = um
  modified_base 18: mod_base = gm
  modified_base 19: mod_base = OTHER; note = 2'O-methyl-adenosine
  modified_base 20: mod_base = um
  modified_base 21: mod_base = gm
  modified_base 1^2: mod_base = OTHER; note = phosphorothioate linkage
  modified_base 2^3: mod_base = OTHER; note = phosphorothioate linkage
accattaaggtgcccatgatg

SEQ ID NO: 655 - RNA, 21 nt, synthetic construct
  source 1..21: mol_type = other RNA
  misc_feature 1..21: note = Description: ZPI siRNA sense strand: ETXS817; corresponding to SEQ ID NO: 335
  modified_base 1: mod_base = gm
  modified_base 2: mod_base = um
  modified_base 3: mod_base = um
  modified_base 4: mod_base = um
  modified_base 5: mod_base = cm
  modified_base 6: mod_base = um
  modified_base 7: mod_base = OTHER; note = 2' Fluoro-guanosine
  modified_base 8: mod_base = gm
  modified_base 9: mod_base = OTHER; note = 2' Fluoro-guanosine
  modified_base 10: mod_base = OTHER; note = 2' Fluoro-cytidine
  modified_base 11: mod_base = OTHER; note = 2'-Fluoro-adenosine
  modified_base 12: mod_base = gm
  modified_base 13: mod_base = gm
  modified_base 14: mod_base = gm
  modified_base 15: mod_base = um
  modified_base 16: mod_base = gm
  modified_base 17: mod_base = gm
  modified_base 18: mod_base = um
  modified_base 19: mod_base = gm
  modified_base 20: mod_base = OTHER; note = 2'O-methyl-adenosine
  modified_base 21: mod_base = OTHER; note = 2'O-methyl-adenosine
  modified_base 1^2: mod_base = OTHER; note = phosphorothioate linkage
  modified_base 2^3: mod_base = OTHER; note = phosphorothioate linkage
gtttctgggcagggtggtgaa

SEQ ID NO: 656 - RNA, 21 nt, synthetic construct
  source 1..21: mol_type = other RNA
  misc_feature 1..21: note = Description: ZPI siRNA sense strand: ETXS819; corresponding to SEQ ID NO: 336
  modified_base 1: mod_base = um
  modified_base 2: mod_base = um
  modified_base 3: mod_base = cm
  modified_base 4: mod_base = um
  modified_base 5: mod_base = gm
  modified_base 6: mod_base = um
  modified_base 7: mod_base = OTHER; note = 2' Fluoro-uridine
  modified_base 8: mod_base = um
  modified_base 9: mod_base = OTHER; note = 2' Fluoro-cytidine
  modified_base 10: mod_base = OTHER; note = 2' Fluoro-uridine
  modified_base 11: mod_base = OTHER; note = 2' Fluoro-guanosine
  modified_base 12: mod_base = gm
  modified_base 13: mod_base = gm
  modified_base 14: mod_base = cm
  modified_base 15: mod_base = OTHER; note = 2'O-methyl-adenosine
  modified_base 16: mod_base = gm
  modified_base 17: mod_base = gm
  modified_base 18: mod_base = gm
  modified_base 19: mod_base = um
  modified_base 20: mod_base = gm
  modified_base 21: mod_base = gm
  modified_base 1^2: mod_base = OTHER; note = phosphorothioate linkage
  modified_base 2^3: mod_base = OTHER; note = phosphorothioate linkage
ttctgtttctgggcagggtgg

SEQ ID NO: 657 - RNA, 21 nt, synthetic construct
  source 1..21: mol_type = other RNA
  misc_feature 1..21: note = Description: ZPI siRNA sense strand: ETXS821; corresponding to SEQ ID NO: 337
  modified_base 1: mod_base = um
  modified_base 2: mod_base = um
  modified_base 3: mod_base = um
  modified_base 4: mod_base = um
  modified_base 5: mod_base = cm
  modified_base 6: mod_base = um
  modified_base 7: mod_base = OTHER; note = 2' Fluoro-uridine
  modified_base 8: mod_base = um
  modified_base 9: mod_base = OTHER; note = 2' Fluoro-cytidine
  modified_base 10: mod_base = OTHER; note = 2' Fluoro-cytidine
  modified_base 11: mod_base = OTHER; note = 2' Fluoro-guanosine
  modified_base 12: mod_base = OTHER; note = 2'O-methyl-adenosine
  modified_base 13: mod_base = OTHER; note = 2'O-methyl-adenosine
  modified_base 14: mod_base = gm
  modified_base 15: mod_base = um
  modified_base 16: mod_base = um
  modified_base 17: mod_base = cm
  modified_base 18: mod_base = OTHER; note = 2'O-methyl-adenosine
  modified_base 19: mod_base = OTHER; note = 2'O-methyl-adenosine
  modified_base 20: mod_base = gm
  modified_base 21: mod_base = cm
  modified_base 1^2: mod_base = OTHER; note = phosphorothioate linkage
  modified_base 2^3: mod_base = OTHER; note = phosphorothioate linkage
ttttctttccgaagttcaagc

SEQ ID NO: 658 - RNA, 21 nt, synthetic construct
  source 1..21: mol_type = other RNA
  misc_feature 1..21: note = Description: ZPI siRNA sense strand: ETXS823; corresponding to SEQ ID NO: 338
  modified_base 1: mod_base = um
  modified_base 2: mod_base = um
  modified_base 3: mod_base = um
  modified_base 4: mod_base = cm
  modified_base 5: mod_base = um
  modified_base 6: mod_base = um
  modified_base 7: mod_base = OTHER; note = 2' Fluoro-uridine
  modified_base 8: mod_base = cm
  modified_base 9: mod_base = OTHER; note = 2' Fluoro-cytidine
  modified_base 10: mod_base = OTHER; note = 2' Fluoro-guanosine
  modified_base 11: mod_base = OTHER; note = 2'-Fluoro-adenosine
  modified_base 12: mod_base = OTHER; note = 2'O-methyl-adenosine
  modified_base 13: mod_base = gm
  modified_base 14: mod_base = um
  modified_base 15: mod_base = um
  modified_base 16: mod_base = cm
  modified_base 17: mod_base = OTHER; note = 2'O-methyl-adenosine
  modified_base 18: mod_base = OTHER; note = 2'O-methyl-adenosine
  modified_base 19: mod_base = gm
  modified_base 20: mod_base = cm
  modified_base 21: mod_base = um
  modified_base 1^2: mod_base = OTHER; note = phosphorothioate linkage
  modified_base 2^3: mod_base = OTHER; note = phosphorothioate linkage
tttctttccgaagttcaagct

SEQ ID NO: 659 - RNA, 21 nt, synthetic construct
  source 1..21: mol_type = other RNA
  misc_feature 1..21: note = Description: ZPI siRNA sense strand: ETXS825; corresponding to SEQ ID NO: 339
  modified_base 1: mod_base = um
  modified_base 2: mod_base = cm
  modified_base 3: mod_base = um
  modified_base 4: mod_base = gm
  modified_base 5: mod_base = um
  modified_base 6: mod_base = um
  modified_base 7: mod_base = OTHER; note = 2' Fluoro-uridine
  modified_base 8: mod_base = cm
  modified_base 9: mod_base = OTHER; note = 2' Fluoro-uridine
  modified_base 10: mod_base = OTHER; note = 2' Fluoro-guanosine
  modified_base 11: mod_base = OTHER; note = 2' Fluoro-guanosine
  modified_base 12: mod_base = gm
  modified_base 13: mod_base = cm
  modified_base 14: mod_base = OTHER; note = 2'O-methyl-adenosine
  modified_base 15: mod_base = gm
  modified_base 16: mod_base = gm
  modified_base 17: mod_base = gm
  modified_base 18: mod_base = um
  modified_base 19: mod_base = gm
  modified_base 20: mod_base = gm
  modified_base 21: mod_base = um
  modified_base 1^2: mod_base = OTHER; note = phosphorothioate linkage
  modified_base 2^3: mod_base = OTHER; note = phosphorothioate linkage
tctgtttctgggcagggtggt

SEQ ID NO: 660 - RNA, 21 nt, synthetic construct
  source 1..21: mol_type = other RNA
  misc_feature 1..21: note = Description: ZPI siRNA sense strand: ETXS827; corresponding to SEQ ID NO: 340
  modified_base 1: mod_base = OTHER; note = 2'O-methyl-adenosine
  modified_base 2: mod_base = um
  modified_base 3: mod_base = gm
  modified_base 4: mod_base = um
  modified_base 5: mod_base = cm
  modified_base 6: mod_base = cm
  modified_base 7: mod_base = OTHER; note = 2' Fluoro-uridine
  modified_base 8: mod_base = cm
  modified_base 9: mod_base = OTHER; note = 2'-Fluoro-adenosine
  modified_base 10: mod_base = OTHER; note = 2'-Fluoro-adenosine
  modified_base 11: mod_base = OTHER; note = 2'-Fluoro-adenosine
  modified_base 12: mod_base = cm
  modified_base 13: mod_base = um
  modified_base 14: mod_base = gm
  modified_base 15: mod_base = cm
  modified_base 16: mod_base = cm
  modified_base 17: mod_base = cm
  modified_base 18: mod_base = um
  modified_base 19: mod_base = OTHER; note = 2'O-methyl-adenosine
  modified_base 20: mod_base = cm
  modified_base 21: mod_base = cm
  modified_base 1^2: mod_base = OTHER; note = phosphorothioate linkage
  modified_base 2^3: mod_base = OTHER; note = phosphorothioate linkage
atgtcctcaaactgccctacc

SEQ ID NO: 661 - RNA, 21 nt, synthetic construct
  source 1..21: mol_type = other RNA
  misc_feature 1..21: note = Description: ZPI siRNA sense strand: ETXS829; corresponding to SEQ ID NO: 341
  modified_base 1: mod_base = um
  modified_base 2: mod_base = cm
  modified_base 3: mod_base = gm
  modified_base 4: mod_base = OTHER; note = 2'O-methyl-adenosine
  modified_base 5: mod_base = cm
  modified_base 6: mod_base = OTHER; note = 2'O-methyl-adenosine
  modified_base 7: mod_base = OTHER; note = 2' Fluoro-cytidine
  modified_base 8: mod_base = um
  modified_base 9: mod_base = OTHER; note = 2' Fluoro-uridine
  modified_base 10: mod_base = OTHER; note = 2' Fluoro-uridine
  modified_base 11: mod_base = OTHER; note = 2' Fluoro-cytidine
  modified_base 12: mod_base = cm
  modified_base 13: mod_base = OTHER; note = 2'O-methyl-adenosine
  modified_base 14: mod_base = cm
  modified_base 15: mod_base = cm
  modified_base 16: mod_base = um
  modified_base 17: mod_base = gm
  modified_base 18: mod_base = gm
  modified_base 19: mod_base = OTHER; note = 2'O-methyl-adenosine
  modified_base 20: mod_base = cm
  modified_base 21: mod_base = OTHER; note = 2'O-methyl-adenosine
  modified_base 1^2: mod_base = OTHER; note = phosphorothioate linkage
  modified_base 2^3: mod_base = OTHER; note = phosphorothioate linkage
tcgacactttccacctggaca

SEQ ID NO: 662 - RNA, 19 nt, synthetic construct
  source 1..19: mol_type = other RNA
  misc_feature 1..19: note = Description: ZPI siRNA sense strand: ETXS831; corresponding to SEQ ID NO: 342
  modified_base 1: mod_base = OTHER; note = 2' Fluoro-cytidine
  modified_base 2: mod_base = cm
  modified_base 3: mod_base = OTHER; note = 2' Fluoro-uridine
  modified_base 4: mod_base = um
  modified_base 5: mod_base = OTHER; note = 2' Fluoro-cytidine
  modified_base 6: mod_base = OTHER; note = 2'O-methyl-adenosine
  modified_base 7: mod_base = OTHER; note = 2' Fluoro-uridine
  modified_base 8: mod_base = cm
  modified_base 9: mod_base = OTHER; note = 2' Fluoro-cytidine
  modified_base 10: mod_base = OTHER; note = 2'O-methyl-adenosine
  modified_base 11: mod_base = OTHER; note = 2' Fluoro-cytidine
  modified_base 12: mod_base = OTHER; note = 2'O-methyl-adenosine
  modified_base 13: mod_base = OTHER; note = 2'-Fluoro-adenosine
  modified_base 14: mod_base = gm
  modified_base 15: mod_base = OTHER; note = 2' Fluoro-guanosine
  modified_base 16: mod_base = OTHER; note = 2'O-methyl-adenosine
  modified_base 17: mod_base = OTHER; note = 2' Fluoro-uridine
  modified_base 18: mod_base = um
  modified_base 19: mod_base = OTHER; note = 2' Fluoro-uridine
  modified_base 1^2: mod_base = OTHER; note = phosphorothioate linkage
  modified_base 2^3: mod_base = OTHER; note = phosphorothioate linkage
ccttcatccacaaggattt

SEQ ID NO: 663 - RNA, 19 nt, synthetic construct
  source 1..19: mol_type = other RNA
  misc_feature 1..19: note = Description: ZPI siRNA sense strand: ETXS833; corresponding to SEQ ID NO: 343
  modified_base 1: mod_base = OTHER; note = 2' Fluoro-cytidine
  modified_base 2: mod_base = gm
  modified_base 3: mod_base = OTHER; note = 2'-Fluoro-adenosine
  modified_base 4: mod_base = OTHER; note = 2'O-methyl-adenosine
  modified_base 5: mod_base = OTHER; note = 2'-Fluoro-adenosine
  modified_base 6: mod_base = gm
  modified_base 7: mod_base = OTHER; note = 2'-Fluoro-adenosine
  modified_base 8: mod_base = um
  modified_base 9: mod_base = OTHER; note = 2' Fluoro-cytidine
  modified_base 10: mod_base = um
  modified_base 11: mod_base = OTHER; note = 2' Fluoro-cytidine
  modified_base 12: mod_base = cm
  modified_base 13: mod_base = OTHER; note = 2'-Fluoro-adenosine
  modified_base 14: mod_base = um
  modified_base 15: mod_base = OTHER; note = 2' Fluoro-guanosine
  modified_base 16: mod_base = OTHER; note = 2'O-methyl-adenosine
  modified_base 17: mod_base = OTHER; note = 2' Fluoro-guanosine
  modified_base 18: mod_base = gm
  modified_base 19: mod_base = OTHER; note = 2' Fluoro-cytidine
  modified_base 1^2: mod_base = OTHER; note = phosphorothioate linkage
  modified_base 2^3: mod_base = OTHER; note = phosphorothioate linkage
cgaaagatctccatgaggc

SEQ ID NO: 664 - RNA, 19 nt, synthetic construct
  source 1..19: mol_type = other RNA
  misc_feature 1..19: note = Description: ZPI siRNA sense strand: ETXS835; corresponding to SEQ ID NO: 344
  modified_base 1: mod_base = OTHER; note = 2' Fluoro-uridine
  modified_base 2: mod_base = gm
  modified_base 3: mod_base = OTHER; note = 2' Fluoro-guanosine
  modified_base 4: mod_base = um
  modified_base 5: mod_base = OTHER; note = 2' Fluoro-guanosine
  modified_base 6: mod_base = gm
  modified_base 7: mod_base = OTHER; note = 2' Fluoro-uridine
  modified_base 8: mod_base = cm
  modified_base 9: mod_base = OTHER; note = 2' Fluoro-cytidine
  modified_base 10: mod_base = um
  modified_base 11: mod_base = OTHER; note = 2' Fluoro-cytidine
  modified_base 12: mod_base = OTHER; note = 2'O-methyl-adenosine
  modified_base 13: mod_base = OTHER; note = 2' Fluoro-uridine
  modified_base 14: mod_base = gm
  modified_base 15: mod_base = OTHER; note = 2' Fluoro-guanosine
  modified_base 16: mod_base = OTHER; note = 2'O-methyl-adenosine
  modified_base 17: mod_base = OTHER; note = 2' Fluoro-guanosine
  modified_base 18: mod_base = OTHER; note = 2'O-methyl-adenosine
  modified_base 19: mod_base = OTHER; note = 2'-Fluoro-adenosine
  modified_base 1^2: mod_base = OTHER; note = phosphorothioate linkage
  modified_base 2^3: mod_base = OTHER; note = phosphorothioate linkage
tggtggtcctcatggagaa

SEQ ID NO: 665 - RNA, 19 nt, synthetic construct
  source 1..19: mol_type = other RNA
  misc_feature 1..19: note = Description: ZPI siRNA sense strand: ETXS837; corresponding to SEQ ID NO: 345
  modified_base 1: mod_base = OTHER; note = 2' Fluoro-guanosine
  modified_base 2: mod_base = OTHER; note = 2'O-methyl-adenosine
  modified_base 3: mod_base = OTHER; note = 2'-Fluoro-adenosine
  modified_base 4: mod_base = OTHER; note = 2'O-methyl-adenosine
  modified_base 5: mod_base = OTHER; note = 2' Fluoro-guanosine
  modified_base 6: mod_base = OTHER; note = 2'O-methyl-adenosine
  modified_base 7: mod_base = OTHER; note = 2' Fluoro-uridine
  modified_base 8: mod_base = cm
  modified_base 9: mod_base = OTHER; note = 2' Fluoro-uridine
  modified_base 10: mod_base = cm
  modified_base 11: mod_base = OTHER; note = 2' Fluoro-cytidine
  modified_base 12: mod_base = OTHER; note = 2'O-methyl-adenosine
  modified_base 13: mod_base = OTHER; note = 2' Fluoro-uridine
  modified_base 14: mod_base = gm
  modified_base 15: mod_base = OTHER; note = 2'-Fluoro-adenosine
  modified_base 16: mod_base = gm
  modified_base 17: mod_base = OTHER; note = 2' Fluoro-guanosine
  modified_base 18: mod_base = cm
  modified_base 19: mod_base = OTHER; note = 2'-Fluoro-adenosine
  modified_base 1^2: mod_base = OTHER; note = phosphorothioate linkage
  modified_base 2^3: mod_base = OTHER; note = phosphorothioate linkage
gaaagatctccatgaggca

SEQ ID NO: 666 - RNA, 19 nt, synthetic construct
  source 1..19: mol_type = other RNA
  misc_feature 1..19: note = Description: ZPI siRNA sense strand: ETXS839; corresponding to SEQ ID NO: 346
  modified_base 1: mod_base = OTHER; note = 2'-Fluoro-adenosine
  modified_base 2: mod_base = um
  modified_base 3: mod_base = OTHER; note = 2' Fluoro-guanosine
  modified_base 4: mod_base = OTHER; note = 2'O-methyl-adenosine
  modified_base 5: mod_base = OTHER; note = 2' Fluoro-guanosine
  modified_base 6: mod_base = OTHER; note = 2'O-methyl-adenosine
  modified_base 7: mod_base = OTHER; note = 2' Fluoro-uridine
  modified_base 8: mod_base = gm
  modified_base 9: mod_base = OTHER; note = 2' Fluoro-cytidine
  modified_base 10: mod_base = OTHER; note = 2'O-methyl-adenosine
  modified_base 11: mod_base = OTHER; note = 2' Fluoro-uridine
  modified_base 12: mod_base = gm
  modified_base 13: mod_base = OTHER; note = 2'-Fluoro-adenosine
  modified_base 14: mod_base = gm
  modified_base 15: mod_base = OTHER; note = 2' Fluoro-cytidine
  modified_base 16: mod_base = um
  modified_base 17: mod_base = OTHER; note = 2' Fluoro-guanosine
  modified_base 18: mod_base = cm
  modified_base 19: mod_base = OTHER; note = 2' Fluoro-uridine
  modified_base 1^2: mod_base = OTHER; note = phosphorothioate linkage
  modified_base 2^3: mod_base = OTHER; note = phosphorothioate linkage
atgagatgcatgagctgct

SEQ ID NO: 667 - RNA, 19 nt, synthetic construct
  source 1..19: mol_type = other RNA
  misc_feature 1..19: note = Description: ZPI siRNA sense strand: ETXS841; corresponding to SEQ ID NO: 347
  modified_base 1: mod_base = OTHER; note = 2' Fluoro-uridine
  modified_base 2: mod_base = um
  modified_base 3: mod_base = OTHER; note = 2' Fluoro-guanosine
  modified_base 4: mod_base = OTHER; note = 2'O-methyl-adenosine
  modified_base 5: mod_base = OTHER; note = 2' Fluoro-uridine
  modified_base 6: mod_base = gm
  modified_base 7: mod_base = OTHER; note = 2'-Fluoro-adenosine
  modified_base 8: mod_base = gm
  modified_base 9: mod_base = OTHER; note = 2'-Fluoro-adenosine
  modified_base 10: mod_base = um
  modified_base 11: mod_base = OTHER; note = 2' Fluoro-uridine
  modified_base 12: mod_base = OTHER; note = 2'O-methyl-adenosine
  modified_base 13: mod_base = OTHER; note = 2'-Fluoro-adenosine
  modified_base 14: mod_base = um
  modified_base 15: mod_base = OTHER; note = 2' Fluoro-cytidine
  modified_base 16: mod_base = cm
  modified_base 17: mod_base = OTHER; note = 2' Fluoro-uridine
  modified_base 18: mod_base = gm
  modified_base 19: mod_base = OTHER; note = 2'-Fluoro-adenosine
  modified_base 1^2: mod_base = OTHER; note = phosphorothioate linkage
  modified_base 2^3: mod_base = OTHER; note = phosphorothioate linkage
ttgatgagattaatcctga

SEQ ID NO: 668 - RNA, 19 nt, synthetic construct
  source 1..19: mol_type = other RNA
  misc_feature 1..19: note = Description: ZPI siRNA sense strand: ETXS843; corresponding to SEQ ID NO: 348
  modified_base 1: mod_base = OTHER; note = 2'-Fluoro-adenosine
  modified_base 2: mod_base = gm
  modified_base 3: mod_base = OTHER; note = 2'-Fluoro-adenosine
  modified_base 4: mod_base = um
  modified_base 5: mod_base = OTHER; note = 2' Fluoro-uridine
  modified_base 6: mod_base = OTHER; note = 2'O-methyl-adenosine
  modified_base 7: mod_base = OTHER; note = 2'-Fluoro-adenosine
  modified_base 8: mod_base = um
  modified_base 9: mod_base = OTHER; note = 2' Fluoro-cytidine
  modified_base 10: mod_base = cm
  modified_base 11: mod_base = OTHER; note = 2' Fluoro-uridine
  modified_base 12: mod_base = gm
  modified_base 13: mod_base = OTHER; note = 2'-Fluoro-adenosine
  modified_base 14: mod_base = OTHER; note = 2'O-methyl-adenosine
  modified_base 15: mod_base = OTHER; note = 2'-Fluoro-adenosine
  modified_base 16: mod_base = cm
  modified_base 17: mod_base = OTHER; note = 2' Fluoro-cytidine
  modified_base 18: mod_base = OTHER; note = 2'O-methyl-adenosine
  modified_base 19: mod_base = OTHER; note = 2'-Fluoro-adenosine
  modified_base 1^2: mod_base = OTHER; note = phosphorothioate linkage
  modified_base 2^3: mod_base = OTHER; note = phosphorothioate linkage
agattaatcctgaaaccaa

SEQ ID NO: 669 - RNA, 19 nt, synthetic construct
  source 1..19: mol_type = other RNA
  misc_feature 1..19: note = Description: ZPI siRNA sense strand: ETXS845; corresponding to SEQ ID NO: 349
  modified_base 1: mod_base = OTHER; note = 2'-Fluoro-adenosine
  modified_base 2: mod_base = um
  modified_base 3: mod_base = OTHER; note = 2' Fluoro-guanosine
  modified_base 4: mod_base = OTHER; note = 2'O-methyl-adenosine
  modified_base 5: mod_base = OTHER; note = 2' Fluoro-guanosine
  modified_base 6: mod_base = OTHER; note = 2'O-methyl-adenosine
  modified_base 7: mod_base = OTHER; note = 2' Fluoro-uridine
  modified_base 8: mod_base = um
  modified_base 9: mod_base = OTHER; note = 2'-Fluoro-adenosine
  modified_base 10: mod_base = OTHER; note = 2'O-methyl-adenosine
  modified_base 11: mod_base = OTHER; note = 2' Fluoro-uridine
  modified_base 12: mod_base = cm
  modified_base 13: mod_base = OTHER; note = 2' Fluoro-cytidine
  modified_base 14: mod_base = um
  modified_base 15: mod_base = OTHER; note = 2' Fluoro-guanosine
  modified_base 16: mod_base = OTHER; note = 2'O-methyl-adenosine
  modified_base 17: mod_base = OTHER; note = 2'-Fluoro-adenosine
  modified_base 18: mod_base = OTHER; note = 2'O-methyl-adenosine
  modified_base 19: mod_base = OTHER; note = 2' Fluoro-cytidine
  modified_base 1^2: mod_base = OTHER; note = phosphorothioate linkage
  modified_base 2^3: mod_base = OTHER; note = phosphorothioate linkage
atgagattaatcctgaaac

SEQ ID NO: 670 - RNA, 19 nt, synthetic construct
  source 1..19: mol_type = other RNA
  misc_feature 1..19: note = Description: ZPI siRNA sense strand: ETXS847; corresponding to SEQ ID NO: 350
  modified_base 1: mod_base = OTHER; note = 2' Fluoro-guanosine
  modified_base 2: mod_base = OTHER; note = 2'O-methyl-adenosine
  modified_base 3: mod_base = OTHER; note = 2' Fluoro-guanosine
  modified_base 4: mod_base = OTHER; note = 2'O-methyl-adenosine
  modified_base 5: mod_base = OTHER; note = 2' Fluoro-uridine
  modified_base 6: mod_base = um
  modified_base 7: mod_base = OTHER; note = 2'-Fluoro-adenosine
  modified_base 8: mod_base = OTHER; note = 2'O-methyl-adenosine
  modified_base 9: mod_base = OTHER; note = 2' Fluoro-uridine
  modified_base 10: mod_base = cm
  modified_base 11: mod_base = OTHER; note = 2' Fluoro-cytidine
  modified_base 12: mod_base = um
  modified_base 13: mod_base = OTHER; note = 2' Fluoro-guanosine
  modified_base 14: mod_base = OTHER; note = 2'O-methyl-adenosine
  modified_base 15: mod_base = OTHER; note = 2'-Fluoro-adenosine
  modified_base 16: mod_base = OTHER; note = 2'O-methyl-adenosine
  modified_base 17: mod_base = OTHER; note = 2' Fluoro-cytidine
  modified_base 18: mod_base = cm
  modified_base 19: mod_base = OTHER; note = 2'-Fluoro-adenosine
  modified_base 1^2: mod_base = OTHER; note = phosphorothioate linkage
  modified_base 2^3: mod_base = OTHER; note = phosphorothioate linkage
gagattaatcctgaaacca

SEQ ID NO: 671 - RNA, 19 nt, synthetic construct
  source 1..19: mol_type = other RNA
  misc_feature 1..19: note = Description: ZPI siRNA sense strand: ETXS849; corresponding to SEQ ID NO: 351
  modified_base 1: mod_base = OTHER; note = 2' Fluoro-uridine
  modified_base 2: mod_base = gm
  modified_base 3: mod_base = OTHER; note = 2'-Fluoro-adenosine
  modified_base 4: mod_base = gm
  modified_base 5: mod_base = OTHER; note = 2'-Fluoro-adenosine
  modified_base 6: mod_base = um
  modified_base 7: mod_base = OTHER; note = 2' Fluoro-uridine
  modified_base 8: mod_base = OTHER; note = 2'O-methyl-adenosine
  modified_base 9: mod_base = OTHER; note = 2'-Fluoro-adenosine
  modified_base 10: mod_base = um
  modified_base 11: mod_base = OTHER; note = 2' Fluoro-cytidine
  modified_base 12: mod_base = cm
  modified_base 13: mod_base = OTHER; note = 2' Fluoro-uridine
  modified_base 14: mod_base = gm
  modified_base 15: mod_base = OTHER; note = 2'-Fluoro-adenosine
  modified_base 16: mod_base = OTHER; note = 2'O-methyl-adenosine
  modified_base 17: mod_base = OTHER; note = 2'-Fluoro-adenosine
  modified_base 18: mod_base = cm
  modified_base 19: mod_base = OTHER; note = 2' Fluoro-cytidine
  modified_base 1^2: mod_base = OTHER; note = phosphorothioate linkage
  modified_base 2^3: mod_base = OTHER; note = phosphorothioate linkage
tgagattaatcctgaaacc

SEQ ID NO: 672 - RNA, 19 nt, synthetic construct
  source 1..19: mol_type = other RNA
  misc_feature 1..19: note = Description: ZPI siRNA sense strand: ETXS851; corresponding to SEQ ID NO: 352
  modified_base 1: mod_base = OTHER; note = 2' Fluoro-guanosine
  modified_base 2: mod_base = um
  modified_base 3: mod_base = OTHER; note = 2' Fluoro-uridine
  modified_base 4: mod_base = um
  modified_base 5: mod_base = OTHER; note = 2' Fluoro-guanosine
  modified_base 6: mod_base = OTHER; note = 2'O-methyl-adenosine
  modified_base 7: mod_base = OTHER; note = 2' Fluoro-uridine
  modified_base 8: mod_base = gm
  modified_base 9: mod_base = OTHER; note = 2'-Fluoro-adenosine
  modified_base 10: mod_base = gm
  modified_base 11: mod_base = OTHER; note = 2'-Fluoro-adenosine
  modified_base 12: mod_base = um
  modified_base 13: mod_base = OTHER; note = 2' Fluoro-uridine
  modified_base 14: mod_base = OTHER; note = 2'O-methyl-adenosine
  modified_base 15: mod_base = OTHER; note = 2'-Fluoro-adenosine
  modified_base 16: mod_base = um
  modified_base 17: mod_base = OTHER; note = 2' Fluoro-cytidine
  modified_base 18: mod_base = cm
  modified_base 19: mod_base = OTHER; note = 2' Fluoro-uridine
  modified_base 1^2: mod_base = OTHER; note = phosphorothioate linkage
  modified_base 2^3: mod_base = OTHER; note = phosphorothioate linkage
gtttgatgagattaatcct

SEQ ID NO: 673 - RNA, 19 nt, synthetic construct
  source 1..19: mol_type = other RNA
  misc_feature 1..19: note = Description: ZPI siRNA sense strand: ETXS853; corresponding to SEQ ID NO: 353
  modified_base 1: mod_base = OTHER; note = 2' Fluoro-uridine
  modified_base 2: mod_base = um
  modified_base 3: mod_base = OTHER; note = 2' Fluoro-guanosine
  modified_base 4: mod_base = cm
  modified_base 5: mod_base = OTHER; note = 2' Fluoro-cytidine
  modified_base 6: mod_base = um
  modified_base 7: mod_base = OTHER; note = 2' Fluoro-uridine
  modified_base 8: mod_base = cm
  modified_base 9: mod_base = OTHER; note = 2'-Fluoro-adenosine
  modified_base 10: mod_base = um
  modified_base 11: mod_base = OTHER; note = 2' Fluoro-cytidine
  modified_base 12: mod_base = cm
  modified_base 13: mod_base = OTHER; note = 2'-Fluoro-adenosine
  modified_base 14: mod_base = cm
  modified_base 15: mod_base = OTHER; note = 2'-Fluoro-adenosine
  modified_base 16: mod_base = OTHER; note = 2'O-methyl-adenosine
  modified_base 17: mod_base = OTHER; note = 2' Fluoro-guanosine
  modified_base 18: mod_base = gm
  modified_base 19: mod_base = OTHER; note = 2'-Fluoro-adenosine
  modified_base 1^2: mod_base = OTHER; note = phosphorothioate linkage
  modified_base 2^3: mod_base = OTHER; note = phosphorothioate linkage
ttgccttcatccacaagga

SEQ ID NO: 674 - RNA, 19 nt, synthetic construct
  source 1..19: mol_type = other RNA
  misc_feature 1..19: note = Description: ZPI siRNA sense strand: ETXS855; corresponding to SEQ ID NO: 354
  modified_base 1: mod_base = OTHER; note = 2'-Fluoro-adenosine
  modified_base 2: mod_base = OTHER; note = 2'O-methyl-adenosine
  modified_base 3: mod_base = OTHER; note = 2'-Fluoro-adenosine
  modified_base 4: mod_base = gm
  modified_base 5: mod_base = OTHER; note = 2'-Fluoro-adenosine
  modified_base 6: mod_base = um
  modified_base 7: mod_base = OTHER; note = 2' Fluoro-cytidine
  modified_base 8: mod_base = um
  modified_base 9: mod_base = OTHER; note = 2' Fluoro-cytidine
  modified_base 10: mod_base = cm
  modified_base 11: mod_base = OTHER; note = 2'-Fluoro-adenosine
  modified_base 12: mod_base = um
  modified_base 13: mod_base = OTHER; note = 2' Fluoro-guanosine
  modified_base 14: mod_base = OTHER; note = 2'O-methyl-adenosine
  modified_base 15: mod_base = OTHER; note = 2' Fluoro-guanosine
  modified_base 16: mod_base = gm
  modified_base 17: mod_base = OTHER; note = 2' Fluoro-cytidine
  modified_base 18: mod_base = OTHER; note = 2'O-methyl-adenosine
  modified_base 19: mod_base = OTHER; note = 2' Fluoro-cytidine
  modified_base 1^2: mod_base = OTHER; note = phosphorothioate linkage
  modified_base 2^3: mod_base = OTHER; note = phosphorothioate linkage
aaagatctccatgaggcac

SEQ ID NO: 675 - RNA, 19 nt, synthetic construct
  source 1..19: mol_type = other RNA
  misc_feature 1..19: note = Description: ZPI siRNA sense strand: ETXS857; corresponding to SEQ ID NO: 355
  modified_base 1: mod_base = OTHER; note = 2' Fluoro-cytidine
  modified_base 2: mod_base = um
  modified_base 3: mod_base = OTHER; note = 2' Fluoro-guanosine
  modified_base 4: mod_base = gm
  modified_base 5: mod_base = OTHER; note = 2' Fluoro-uridine
  modified_base 6: mod_base = gm
  modified_base 7: mod_base = OTHER; note = 2' Fluoro-guanosine
  modified_base 8: mod_base = um
  modified_base 9: mod_base = OTHER; note = 2' Fluoro-cytidine
  modified_base 10: mod_base = cm
  modified_base 11: mod_base = OTHER; note = 2' Fluoro-uridine
  modified_base 12: mod_base = cm
  modified_base 13: mod_base = OTHER; note = 2'-Fluoro-adenosine
  modified_base 14: mod_base = um
  modified_base 15: mod_base = OTHER; note = 2' Fluoro-guanosine
  modified_base 16: mod_base = gm
  modified_base 17: mod_base = OTHER; note = 2'-Fluoro-adenosine
  modified_base 18: mod_base = gm
  modified_base 19: mod_base = OTHER; note = 2'-Fluoro-adenosine
  modified_base 1^2: mod_base = OTHER; note = phosphorothioate linkage
  modified_base 2^3: mod_base = OTHER; note = phosphorothioate linkage
ctggtggtcctcatggaga

SEQ ID NO: 676 - RNA, 19 nt, synthetic construct
  source 1..19: mol_type = other RNA
  misc_feature 1..19: note = Description: ZPI siRNA sense strand: ETXS859; corresponding to SEQ ID NO: 356
  modified_base 1: mod_base = OTHER; note = 2' Fluoro-uridine
  modified_base 2: mod_base = um
  modified_base 3: mod_base = OTHER; note = 2' Fluoro-cytidine
  modified_base 4: mod_base = OTHER; note = 2'O-methyl-adenosine
  modified_base 5: mod_base = OTHER; note = 2' Fluoro-uridine
  modified_base 6: mod_base = cm
  modified_base 7: mod_base = OTHER; note = 2' Fluoro-cytidine
  modified_base 8: mod_base = OTHER; note = 2'O-methyl-adenosine
  modified_base 9: mod_base = OTHER; note = 2' Fluoro-cytidine
  modified_base 10: mod_base = OTHER; note = 2'O-methyl-adenosine
  modified_base 11: mod_base = OTHER; note = 2'-Fluoro-adenosine
  modified_base 12: mod_base = gm
  modified_base 13: mod_base = OTHER; note = 2' Fluoro-guanosine
  modified_base 14: mod_base = OTHER; note = 2'O-methyl-adenosine
  modified_base 15: mod_base = OTHER; note = 2' Fluoro-uridine
  modified_base 16: mod_base = um
  modified_base 17: mod_base = OTHER; note = 2' Fluoro-uridine
  modified_base 18: mod_base = um
  modified_base 19: mod_base = OTHER; note = 2' Fluoro-guanosine
  modified_base 1^2: mod_base = OTHER; note = phosphorothioate linkage
  modified_base 2^3: mod_base = OTHER; note = phosphorothioate linkage
ttcatccacaaggattttg

SEQ ID NO: 677 - RNA, 19 nt, synthetic construct
  source 1..19: mol_type = other RNA
  misc_feature 1..19: note = Description: ZPI siRNA sense strand: ETXS861; corresponding to SEQ ID NO: 357
  modified_base 1: mod_base = OTHER; note = 2'-Fluoro-adenosine
  modified_base 2: mod_base = OTHER; note = 2'O-methyl-adenosine
  modified_base 3: mod_base = OTHER; note = 2' Fluoro-guanosine
  modified_base 4: mod_base = OTHER; note = 2'O-methyl-adenosine
  modified_base 5: mod_base = OTHER; note = 2' Fluoro-uridine
  modified_base 6: mod_base = cm
  modified_base 7: mod_base = OTHER; note = 2' Fluoro-uridine
  modified_base 8: mod_base = cm
  modified_base 9: mod_base = OTHER; note = 2' Fluoro-cytidine
  modified_base 10: mod_base = OTHER; note = 2'O-methyl-adenosine
  modified_base 11: mod_base = OTHER; note = 2' Fluoro-uridine
  modified_base 12: mod_base = gm
  modified_base 13: mod_base = OTHER; note = 2'-Fluoro-adenosine
  modified_base 14: mod_base = gm
  modified_base 15: mod_base = OTHER; note = 2' Fluoro-guanosine
  modified_base 16: mod_base = cm
  modified_base 17: mod_base = OTHER; note = 2'-Fluoro-adenosine
  modified_base 18: mod_base = cm
  modified_base 19: mod_base = OTHER; note = 2' Fluoro-guanosine
  modified_base 1^2: mod_base = OTHER; note = phosphorothioate linkage
  modified_base 2^3: mod_base = OTHER; note = phosphorothioate linkage
aagatctccatgaggcacg

SEQ ID NO: 678 - RNA, 19 nt, synthetic construct
  source 1..19: mol_type = other RNA
  misc_feature 1..19: note = Description: ZPI siRNA sense strand: ETXS863; corresponding to SEQ ID NO: 358
  modified_base 1: mod_base = OTHER; note = 2' Fluoro-cytidine
  modified_base 2: mod_base = OTHER; note = 2'O-methyl-adenosine
  modified_base 3: mod_base = OTHER; note = 2' Fluoro-uridine
  modified_base 4: mod_base = cm
  modified_base 5: mod_base = OTHER; note = 2' Fluoro-cytidine
  modified_base 6: mod_base = OTHER; note = 2'O-methyl-adenosine
  modified_base 7: mod_base = OTHER; note = 2' Fluoro-cytidine
  modified_base 8: mod_base = OTHER; note = 2'O-methyl-adenosine
  modified_base 9: mod_base = OTHER; note = 2'-Fluoro-adenosine
  modified_base 10: mod_base = gm
  modified_base 11: mod_base = OTHER; note = 2' Fluoro-guanosine
  modified_base 12: mod_base = OTHER; note = 2'O-methyl-adenosine
  modified_base 13: mod_base = OTHER; note = 2' Fluoro-uridine
  modified_base 14: mod_base = um
  modified_base 15: mod_base = OTHER; note = 2' Fluoro-uridine
  modified_base 16: mod_base = um
  modified_base 17: mod_base = OTHER; note = 2' Fluoro-guanosine
  modified_base 18: mod_base = OTHER; note = 2'O-methyl-adenosine
  modified_base 19: mod_base = OTHER; note = 2' Fluoro-uridine
  modified_base 1^2: mod_base = OTHER; note = phosphorothioate linkage
  modified_base 2^3: mod_base = OTHER; note = phosphorothioate linkage
catccacaaggattttgat

SEQ ID NO: 679 - RNA, 19 nt, synthetic construct
  source 1..19: mol_type = other RNA
  misc_feature 1..19: note = Description: ZPI siRNA sense strand: ETXS865; corresponding to SEQ ID NO: 359
  modified_base 1: mod_base = OTHER; note = 2' Fluoro-uridine
  modified_base 2: mod_base = gm
  modified_base 3: mod_base = OTHER; note = 2'-Fluoro-adenosine
  modified_base 4: mod_base = um
  modified_base 5: mod_base = OTHER; note = 2' Fluoro-guanosine
  modified_base 6: mod_base = OTHER; note = 2'O-methyl-adenosine
  modified_base 7: mod_base = OTHER; note = 2' Fluoro-guanosine
  modified_base 8: mod_base = OTHER; note = 2'O-methyl-adenosine
  modified_base 9: mod_base = OTHER; note = 2' Fluoro-uridine
  modified_base 10: mod_base = um
  modified_base 11: mod_base = OTHER; note = 2'-Fluoro-adenosine
  modified_base 12: mod_base = OTHER; note = 2'O-methyl-adenosine
  modified_base 13: mod_base = OTHER; note = 2' Fluoro-uridine
  modified_base 14: mod_base = cm
  modified_base 15: mod_base = OTHER; note = 2' Fluoro-cytidine
  modified_base 16: mod_base = um
  modified_base 17: mod_base = OTHER; note = 2' Fluoro-guanosine
  modified_base 18: mod_base = OTHER; note = 2'O-methyl-adenosine
  modified_base 19: mod_base = OTHER; note = 2'-Fluoro-adenosine
  modified_base 1^2: mod_base = OTHER; note = phosphorothioate linkage
  modified_base 2^3: mod_base = OTHER; note = phosphorothioate linkage
tgatgagattaatcctgaa

SEQ ID NO: 680 - RNA, 19 nt, synthetic construct
  source 1..19: mol_type = other RNA
  misc_feature 1..19: note = Description: ZPI siRNA sense strand: ETXS867; corresponding to SEQ ID NO: 360
  modified_base 1: mod_base = OTHER; note = 2' Fluoro-guanosine
  modified_base 2: mod_base = cm
  modified_base 3: mod_base = OTHER; note = 2' Fluoro-cytidine
  modified_base 4: mod_base = um
  modified_base 5: mod_base = OTHER; note = 2' Fluoro-uridine
  modified_base 6: mod_base = cm
  modified_base 7: mod_base = OTHER; note = 2'-Fluoro-adenosine
  modified_base 8: mod_base = um
  modified_base 9: mod_base = OTHER; note = 2' Fluoro-cytidine
  modified_base 10: mod_base = cm
  modified_base 11: mod_base = OTHER; note = 2'-Fluoro-adenosine
  modified_base 12: mod_base = cm
  modified_base 13: mod_base = OTHER; note = 2'-Fluoro-adenosine
  modified_base 14: mod_base = OTHER; note = 2'O-methyl-adenosine
  modified_base 15: mod_base = OTHER; note = 2' Fluoro-guanosine
  modified_base 16: mod_base = gm
  modified_base 17: mod_base = OTHER; note = 2'-Fluoro-adenosine
  modified_base 18: mod_base = um
  modified_base 19: mod_base = OTHER; note = 2' Fluoro-uridine
  modified_base 1^2: mod_base = OTHER; note = phosphorothioate linkage
  modified_base 2^3: mod_base = OTHER; note = phosphorothioate linkage
gccttcatccacaaggatt

SEQ ID NO: 681 - RNA, 19 nt, synthetic construct
  source 1..19: mol_type = other RNA
  misc_feature 1..19: note = Description: ZPI siRNA sense strand: ETXS869; corresponding to SEQ ID NO: 361
  modified_base 1: mod_base = OTHER; note = 2' Fluoro-uridine
  modified_base 2: mod_base = cm
  modified_base 3: mod_base = OTHER; note = 2' Fluoro-uridine
  modified_base 4: mod_base = cm
  modified_base 5: mod_base = OTHER; note = 2' Fluoro-cytidine
  modified_base 6: mod_base = OTHER; note = 2'O-methyl-adenosine
  modified_base 7: mod_base = OTHER; note = 2' Fluoro-uridine
  modified_base 8: mod_base = gm
  modified_base 9: mod_base = OTHER; note = 2'-Fluoro-adenosine
  modified_base 10: mod_base = gm
  modified_base 11: mod_base = OTHER; note = 2' Fluoro-guanosine
  modified_base 12: mod_base = cm
  modified_base 13: mod_base = OTHER; note = 2'-Fluoro-adenosine
  modified_base 14: mod_base = cm
  modified_base 15: mod_base = OTHER; note = 2' Fluoro-guanosine
  modified_base 16: mod_base = OTHER; note = 2'O-methyl-adenosine
  modified_base 17: mod_base = OTHER; note = 2' Fluoro-uridine
  modified_base 18: mod_base = gm
  modified_base 19: mod_base = OTHER; note = 2' Fluoro-guanosine
  modified_base 1^2: mod_base = OTHER; note = phosphorothioate linkage
  modified_base 2^3: mod_base = OTHER; note = phosphorothioate linkage
tctccatgaggcacgatgg

SEQ ID NO: 682 - RNA, 21 nt, synthetic construct
  source 1..21: mol_type = other RNA
  misc_feature 1..21: note = Description: ZPI siRNA sense strand: ETXS871; corresponding to SEQ ID NO: 242
  modified_base 1: mod_base = um
  modified_base 2: mod_base = gm
  modified_base 3: mod_base = cm
  modified_base 4: mod_base = cm
  modified_base 5: mod_base = um
  modified_base 6: mod_base = um
  modified_base 7: mod_base = OTHER; note = 2' Fluoro-cytidine
  modified_base 8: mod_base = OTHER; note = 2'-Fluoro-adenosine
  modified_base 9: mod_base = OTHER; note = 2' Fluoro-uridine
  modified_base 10: mod_base = OTHER; note = 2' Fluoro-cytidine
  modified_base 11: mod_base = OTHER; note = 2' Fluoro-cytidine
  modified_base 12: mod_base = OTHER; note = 2'O-methyl-adenosine
  modified_base 13: mod_base = cm
  modified_base 14: mod_base = OTHER; note = 2'O-methyl-adenosine
  modified_base 15: mod_base = OTHER; note = 2'O-methyl-adenosine
  modified_base 16: mod_base = gm
  modified_base 17: mod_base = gm
  modified_base 18: mod_base = OTHER; note = 2'O-methyl-adenosine
  modified_base 19: mod_base = OTHER; note = 2' Fluoro-uridine
  modified_base 20: mod_base = um
  modified_base 21: mod_base = um
  modified_base 1^2: mod_base = OTHER; note = phosphorothioate linkage
  modified_base 2^3: mod_base = OTHER; note = phosphorothioate linkage
tgccttcatccacaaggattt

SEQ ID NO: 683 - RNA, 21 nt, synthetic construct
  source 1..21: mol_type = other RNA
  misc_feature 1..21: note = Description: ZPI siRNA sense strand: ETXS873; corresponding to SEQ ID NO: 243
  modified_base 1: mod_base = um
  modified_base 2: mod_base = gm
  modified_base 3: mod_base = cm
  modified_base 4: mod_base = gm
  modified_base 5: mod_base = OTHER; note = 2'O-methyl-adenosine
  modified_base 6: mod_base = OTHER; note = 2'O-methyl-adenosine
  modified_base 7: mod_base = OTHER; note = 2'-Fluoro-adenosine
  modified_base 8: mod_base = OTHER; note = 2' Fluoro-guanosine
  modified_base 9: mod_base = OTHER; note = 2'-Fluoro-adenosine
  modified_base 10: mod_base = OTHER; note = 2' Fluoro-uridine
  modified_base 11: mod_base = OTHER; note = 2' Fluoro-cytidine
  modified_base 12: mod_base = um
  modified_base 13: mod_base = cm
  modified_base 14: mod_base = cm
  modified_base 15: mod_base = OTHER; note = 2'O-methyl-adenosine
  modified_base 16: mod_base = um
  modified_base 17: mod_base = gm
  modified_base 18: mod_base = OTHER; note = 2'O-methyl-adenosine
  modified_base 19: mod_base = OTHER; note = 2' Fluoro-guanosine
  modified_base 20: mod_base = gm
  modified_base 21: mod_base = cm
  modified_base 1^2: mod_base = OTHER; note = phosphorothioate linkage
  modified_base 2^3: mod_base = OTHER; note = phosphorothioate linkage
tgcgaaagatctccatgaggc

SEQ ID NO: 684 - RNA, 21 nt, synthetic construct
  source 1..21: mol_type = other RNA
  misc_feature 1..21: note = Description: ZPI siRNA sense strand: ETXS875; corresponding to SEQ ID NO: 244
  modified_base 1: mod_base = gm
  modified_base 2: mod_base = cm
  modified_base 3: mod_base = um
  modified_base 4: mod_base = gm
  modified_base 5: mod_base = gm
  modified_base 6: mod_base = um
  modified_base 7: mod_base = OTHER; note = 2' Fluoro-guanosine
  modified_base 8: mod_base = OTHER; note = 2' Fluoro-guanosine
  modified_base 9: mod_base = OTHER; note = 2' Fluoro-uridine
  modified_base 10: mod_base = OTHER; note = 2' Fluoro-cytidine
  modified_base 11: mod_base = OTHER; note = 2' Fluoro-cytidine
  modified_base 12: mod_base = um
  modified_base 13: mod_base = cm
  modified_base 14: mod_base = OTHER; note = 2'O-methyl-adenosine
  modified_base 15: mod_base = um
  modified_base 16: mod_base = gm
  modified_base 17: mod_base = gm
  modified_base 18: mod_base = OTHER; note = 2'O-methyl-adenosine
  modified_base 19: mod_base = OTHER; note = 2' Fluoro-guanosine
  modified_base 20: mod_base = OTHER; note = 2'O-methyl-adenosine
  modified_base 21: mod_base = OTHER; note = 2'O-methyl-adenosine
  modified_base 1^2: mod_base = OTHER; note = phosphorothioate linkage
  modified_base 2^3: mod_base = OTHER; note = phosphorothioate linkage
gctggtggtcctcatggagaa

SEQ ID NO: 685 - RNA, 21 nt, synthetic construct
  source 1..21: mol_type = other RNA
  misc_feature 1..21: note = Description: ZPI siRNA sense strand: ETXS877; corresponding to SEQ ID NO: 245
  modified_base 1: mod_base = gm
  modified_base 2: mod_base = cm
  modified_base 3: mod_base = gm
  modified_base 4: mod_base = OTHER; note = 2'O-methyl-adenosine
  modified_base 5: mod_base = OTHER; note = 2'O-methyl-adenosine
  modified_base 6: mod_base = OTHER; note = 2'O-methyl-adenosine
  modified_base 7: mod_base = OTHER; note = 2' Fluoro-guanosine
  modified_base 8: mod_base = OTHER; note = 2'-Fluoro-adenosine
  modified_base 9: mod_base = OTHER; note = 2' Fluoro-uridine
  modified_base 10: mod_base = OTHER; note = 2' Fluoro-cytidine
  modified_base 11: mod_base = OTHER; note = 2' Fluoro-uridine
  modified_base 12: mod_base = cm
  modified_base 13: mod_base = cm
  modified_base 14: mod_base = OTHER; note = 2'O-methyl-adenosine
  modified_base 15: mod_base = um
  modified_base 16: mod_base = gm
  modified_base 17: mod_base = OTHER; note = 2'O-methyl-adenosine
  modified_base 18: mod_base = gm
  modified_base 19: mod_base = OTHER; note = 2' Fluoro-guanosine
  modified_base 20: mod_base = cm
  modified_base 21: mod_base = OTHER; note = 2'O-methyl-adenosine
  modified_base 1^2: mod_base = OTHER; note = phosphorothioate linkage
  modified_base 2^3: mod_base = OTHER; note = phosphorothioate linkage
gcgaaagatctccatgaggca

SEQ ID NO: 686 - RNA, 21 nt, synthetic construct
  source 1..21: mol_type = other RNA
  misc_feature 1..21: note = Description: ZPI siRNA sense strand: ETXS879; corresponding to SEQ ID NO: 246
  modified_base 1: mod_base = gm
  modified_base 2: mod_base = um
  modified_base 3: mod_base = OTHER; note = 2'O-methyl-adenosine
  modified_base 4: mod_base = um
  modified_base 5: mod_base = gm
  modified_base 6: mod_base = OTHER; note = 2'O-methyl-adenosine
  modified_base 7: mod_base = OTHER; note = 2' Fluoro-guanosine
  modified_base 8: mod_base = OTHER; note = 2'-Fluoro-adenosine
  modified_base 9: mod_base = OTHER; note = 2' Fluoro-uridine
  modified_base 10: mod_base = OTHER; note = 2' Fluoro-guanosine
  modified_base 11: mod_base = OTHER; note = 2' Fluoro-cytidine
  modified_base 12: mod_base = OTHER; note = 2'O-methyl-adenosine
  modified_base 13: mod_base = um
  modified_base 14: mod_base = gm
  modified_base 15: mod_base = OTHER; note = 2'O-methyl-adenosine
  modified_base 16: mod_base = gm
  modified_base 17: mod_base = cm
  modified_base 18: mod_base = um
  modified_base 19: mod_base = OTHER; note = 2' Fluoro-guanosine
  modified_base 20: mod_base = cm
  modified_base 21: mod_base = um
  modified_base 1^2: mod_base = OTHER; note = phosphorothioate linkage
  modified_base 2^3: mod_base = OTHER; note = phosphorothioate linkage
gtatgagatgcatgagctgct

SEQ ID NO: 687 - RNA, 21 nt, synthetic construct
  source 1..21: mol_type = other RNA
  misc_feature 1..21: note = Description: ZPI siRNA sense strand: ETXS881; corresponding to SEQ ID NO: 247
  modified_base 1: mod_base = gm
  modified_base 2: mod_base = um
  modified_base 3: mod_base = um
  modified_base 4: mod_base = um
  modified_base 5: mod_base = gm
  modified_base 6: mod_base = OTHER; note = 2'O-methyl-adenosine
  modified_base 7: mod_base = OTHER; note = 2' Fluoro-uridine
  modified_base 8: mod_base = OTHER; note = 2' Fluoro-guanosine
  modified_base 9: mod_base = OTHER; note = 2'-Fluoro-adenosine
  modified_base 10: mod_base = OTHER; note = 2' Fluoro-guanosine
  modified_base 11: mod_base = OTHER; note = 2'-Fluoro-adenosine
  modified_base 12: mod_base = um
  modified_base 13: mod_base = um
  modified_base 14: mod_base = OTHER; note = 2'O-methyl-adenosine
  modified_base 15: mod_base = OTHER; note = 2'O-methyl-adenosine
  modified_base 16: mod_base = um
  modified_base 17: mod_base = cm
  modified_base 18: mod_base = cm
  modified_base 19: mod_base = OTHER; note = 2' Fluoro-uridine
  modified_base 20: mod_base = gm
  modified_base 21: mod_base = OTHER; note = 2'O-methyl-adenosine
  modified_base 1^2: mod_base = OTHER; note = phosphorothioate linkage
  modified_base 2^3: mod_base = OTHER; note = phosphorothioate linkage
gtttgatgagattaatcctga

SEQ ID NO: 688 - RNA, 21 nt, synthetic construct
  source 1..21: mol_type = other RNA
  misc_feature 1..21: note = Description: ZPI siRNA sense strand: ETXS883; corresponding to SEQ ID NO: 248
  modified_base 1: mod_base = um
  modified_base 2: mod_base = gm
  modified_base 3: mod_base = OTHER; note = 2'O-methyl-adenosine
  modified_base 4: mod_base = gm
  modified_base 5: mod_base = OTHER; note = 2'O-methyl-adenosine
  modified_base 6: mod_base = um
  modified_base 7: mod_base = OTHER; note = 2' Fluoro-uridine
  modified_base 8: mod_base = OTHER; note = 2'-Fluoro-adenosine
  modified_base 9: mod_base = OTHER; note = 2'-Fluoro-adenosine
  modified_base 10: mod_base = OTHER; note = 2' Fluoro-uridine
  modified_base 11: mod_base = OTHER; note = 2' Fluoro-cytidine
  modified_base 12: mod_base = cm
  modified_base 13: mod_base = um
  modified_base 14: mod_base = gm
  modified_base 15: mod_base = OTHER; note = 2'O-methyl-adenosine
  modified_base 16: mod_base = OTHER; note = 2'O-methyl-adenosine
  modified_base 17: mod_base = OTHER; note = 2'O-methyl-adenosine
  modified_base 18: mod_base = cm
  modified_base 19: mod_base = OTHER; note = 2' Fluoro-cytidine
  modified_base 20: mod_base = OTHER; note = 2'O-methyl-adenosine
  modified_base 21: mod_base = OTHER; note = 2'O-methyl-adenosine
  modified_base 1^2: mod_base = OTHER; note = phosphorothioate linkage
  modified_base 2^3: mod_base = OTHER; note = phosphorothioate linkage
tgagattaatcctgaaaccaa

SEQ ID NO: 689 - RNA, 21 nt, synthetic construct
  source 1..21: mol_type = other RNA
  misc_feature 1..21: note = Description: ZPI siRNA sense strand: ETXS885; corresponding to SEQ ID NO: 249
  modified_base 1: mod_base = um
  modified_base 2: mod_base = gm
  modified_base 3: mod_base = OTHER; note = 2'O-methyl-adenosine
  modified_base 4: mod_base = um
  modified_base 5: mod_base = gm
  modified_base 6: mod_base = OTHER; note = 2'O-methyl-adenosine
  modified_base 7: mod_base = OTHER; note = 2' Fluoro-guanosine
  modified_base 8: mod_base = OTHER; note = 2'-Fluoro-adenosine
  modified_base 9: mod_base = OTHER; note = 2' Fluoro-uridine
  modified_base 10: mod_base = OTHER; note = 2' Fluoro-uridine
  modified_base 11: mod_base = OTHER; note = 2'-Fluoro-adenosine
  modified_base 12: mod_base = OTHER; note = 2'O-methyl-adenosine
  modified_base 13: mod_base = um
  modified_base 14: mod_base = cm
  modified_base 15: mod_base = cm
  modified_base 16: mod_base = um
  modified_base 17: mod_base = gm
  modified_base 18: mod_base = OTHER; note = 2'O-methyl-adenosine
  modified_base 19: mod_base = OTHER; note = 2'-Fluoro-adenosine
  modified_base 20: mod_base = OTHER; note = 2'O-methyl-adenosine
  modified_base 21: mod_base = cm
  modified_base 1^2: mod_base = OTHER; note = phosphorothioate linkage
  modified_base 2^3: mod_base = OTHER; note = phosphorothioate linkage
tgatgagattaatcctgaaac

SEQ ID NO: 690 - RNA, 21 nt, synthetic construct
  source 1..21: mol_type = other RNA
  misc_feature 1..21: note = Description: ZPI siRNA sense strand: ETXS887; corresponding to SEQ ID NO: 250
  modified_base 1: mod_base = OTHER; note = 2'O-methyl-adenosine
  modified_base 2: mod_base = um
  modified_base 3: mod_base = gm
  modified_base 4: mod_base = OTHER; note = 2'O-methyl-adenosine
  modified_base 5: mod_base = gm
  modified_base 6: mod_base = OTHER; note = 2'O-methyl-adenosine
  modified_base 7: mod_base = OTHER; note = 2' Fluoro-uridine
  modified_base 8: mod_base = OTHER; note = 2' Fluoro-uridine
  modified_base 9: mod_base = OTHER; note = 2'-Fluoro-adenosine
  modified_base 10: mod_base = OTHER; note = 2'-Fluoro-adenosine
  modified_base 11: mod_base = OTHER; note = 2' Fluoro-uridine
  modified_base 12: mod_base = cm
  modified_base 13: mod_base = cm
  modified_base 14: mod_base = um
  modified_base 15: mod_base = gm
  modified_base 16: mod_base = OTHER; note = 2'O-methyl-adenosine
  modified_base 17: mod_base = OTHER; note = 2'O-methyl-adenosine
  modified_base 18: mod_base = OTHER; note = 2'O-methyl-adenosine
  modified_base 19: mod_base = OTHER; note = 2' Fluoro-cytidine
  modified_base 20: mod_base = cm
  modified_base 21: mod_base = OTHER; note = 2'O-methyl-adenosine
  modified_base 1^2: mod_base = OTHER; note = phosphorothioate linkage
  modified_base 2^3: mod_base = OTHER; note = phosphorothioate linkage
atgagattaatcctgaaacca

SEQ ID NO: 691 - RNA, 21 nt, synthetic construct
  source 1..21: mol_type = other RNA
  misc_feature 1..21: note = Description: ZPI siRNA sense strand: ETXS889; corresponding to SEQ ID NO: 251
  modified_base 1: mod_base = gm
  modified_base 2: mod_base = OTHER; note = 2'O-methyl-adenosine
  modified_base 3: mod_base = um
  modified_base 4: mod_base = gm
  modified_base 5: mod_base = OTHER; note = 2'O-methyl-adenosine
  modified_base 6: mod_base = gm
  modified_base 7: mod_base = OTHER; note = 2'-Fluoro-adenosine
  modified_base 8: mod_base = OTHER; note = 2' Fluoro-uridine
  modified_base 9: mod_base = OTHER; note = 2' Fluoro-uridine
  modified_base 10: mod_base = OTHER; note = 2'-Fluoro-adenosine
  modified_base 11: mod_base = OTHER; note = 2'-Fluoro-adenosine
  modified_base 12: mod_base = um
  modified_base 13: mod_base = cm
  modified_base 14: mod_base = cm
  modified_base 15: mod_base = um
  modified_base 16: mod_base = gm
  modified_base 17: mod_base = OTHER; note = 2'O-methyl-adenosine
  modified_base 18: mod_base = OTHER; note = 2'O-methyl-adenosine
  modified_base 19: mod_base = OTHER; note = 2'-Fluoro-adenosine
  modified_base 20: mod_base = cm
  modified_base 21: mod_base = cm
  modified_base 1^2: mod_base = OTHER; note = phosphorothioate linkage
  modified_base 2^3: mod_base = OTHER; note = phosphorothioate linkage
gatgagattaatcctgaaacc

SEQ ID NO: 692 - RNA, 21 nt, synthetic construct
  source 1..21: mol_type = other RNA
  misc_feature 1..21: note = Description: ZPI siRNA sense strand: ETXS891; corresponding to SEQ ID NO: 252
  modified_base 1: mod_base = cm
  modified_base 2: mod_base = um
  modified_base 3: mod_base = gm
  modified_base 4: mod_base = um
  modified_base 5: mod_base = um
  modified_base 6: mod_base = um
  modified_base 7: mod_base = OTHER; note = 2' Fluoro-guanosine
  modified_base 8: mod_base = OTHER; note = 2'-Fluoro-adenosine
  modified_base 9: mod_base = OTHER; note = 2' Fluoro-uridine
  modified_base 10: mod_base = OTHER; note = 2' Fluoro-guanosine
  modified_base 11: mod_base = OTHER; note = 2'-Fluoro-adenosine
  modified_base 12: mod_base = gm
  modified_base 13: mod_base = OTHER; note = 2'O-methyl-adenosine
  modified_base 14: mod_base = um
  modified_base 15: mod_base = um
  modified_base 16: mod_base = OTHER; note = 2'O-methyl-adenosine
  modified_base 17: mod_base = OTHER; note = 2'O-methyl-adenosine
  modified_base 18: mod_base = um
  modified_base 19: mod_base = OTHER; note = 2' Fluoro-cytidine
  modified_base 20: mod_base = cm
  modified_base 21: mod_base = um
  modified_base 1^2: mod_base = OTHER; note = phosphorothioate linkage
  modified_base 2^3: mod_base = OTHER; note = phosphorothioate linkage
ctgtttgatgagattaatcct

SEQ ID NO: 693 - RNA, 21 nt, synthetic construct
  source 1..21: mol_type = other RNA
  misc_feature 1..21: note = Description: ZPI siRNA sense strand: ETXS893; corresponding to SEQ ID NO: 253
  modified_base 1: mod_base = um
  modified_base 2: mod_base = um
  modified_base 3: mod_base = um
  modified_base 4: mod_base = um
  modified_base 5: mod_base = gm
  modified_base 6: mod_base = cm
  modified_base 7: mod_base = OTHER; note = 2' Fluoro-cytidine
  modified_base 8: mod_base = OTHER; note = 2' Fluoro-uridine
  modified_base 9: mod_base = OTHER; note = 2' Fluoro-uridine
  modified_base 10: mod_base = OTHER; note = 2' Fluoro-cytidine
  modified_base 11: mod_base = OTHER; note = 2'-Fluoro-adenosine
  modified_base 12: mod_base = um
  modified_base 13: mod_base = cm
  modified_base 14: mod_base = cm
  modified_base 15: mod_base = OTHER; note = 2'O-methyl-adenosine
  modified_base 16: mod_base = cm
  modified_base 17: mod_base = OTHER; note = 2'O-methyl-adenosine
  modified_base 18: mod_base = OTHER; note = 2'O-methyl-adenosine
  modified_base 19: mod_base = OTHER; note = 2' Fluoro-guanosine
  modified_base 20: mod_base = gm
  modified_base 21: mod_base = OTHER; note = 2'O-methyl-adenosine
  modified_base 1^2: mod_base = OTHER; note = phosphorothioate linkage
  modified_base 2^3: mod_base = OTHER; note = phosphorothioate linkage
ttttgccttcatccacaagga

SEQ ID NO: 694 - RNA, 21 nt, synthetic construct
  source 1..21: mol_type = other RNA
  misc_feature 1..21: note = Description: ZPI siRNA sense strand: ETXS895; corresponding to SEQ ID NO: 254
  modified_base 1: mod_base = cm
  modified_base 2: mod_base = gm
  modified_base 3: mod_base = OTHER; note = 2'O-methyl-adenosine
  modified_base 4: mod_base = OTHER; note = 2'O-methyl-adenosine
  modified_base 5: mod_base = OTHER; note = 2'O-methyl-adenosine
  modified_base 6: mod_base = gm
  modified_base 7: mod_base = OTHER; note = 2'-Fluoro-adenosine
  modified_base 8: mod_base = OTHER; note = 2' Fluoro-uridine
  modified_base 9: mod_base = OTHER; note = 2' Fluoro-cytidine
  modified_base 10: mod_base = OTHER; note = 2' Fluoro-uridine
  modified_base 11: mod_base = OTHER; note = 2' Fluoro-cytidine
  modified_base 12: mod_base = cm
  modified_base 13: mod_base = OTHER; note = 2'O-methyl-adenosine
  modified_base 14: mod_base = um
  modified_base 15: mod_base = gm
  modified_base 16: mod_base = OTHER; note = 2'O-methyl-adenosine
  modified_base 17: mod_base = gm
  modified_base 18: mod_base = gm
  modified_base 19: mod_base = OTHER; note = 2' Fluoro-cytidine
  modified_base 20: mod_base = OTHER; note = 2'O-methyl-adenosine
  modified_base 21: mod_base = cm
  modified_base 1^2: mod_base = OTHER; note = phosphorothioate linkage
  modified_base 2^3: mod_base = OTHER; note = phosphorothioate linkage
cgaaagatctccatgaggcac

SEQ ID NO: 695 - RNA, 21 nt, synthetic construct
  source 1..21: mol_type = other RNA
  misc_feature 1..21: note = Description: ZPI siRNA sense strand: ETXS897; corresponding to SEQ ID NO: 255
  modified_base 1: mod_base = um
  modified_base 2: mod_base = gm
  modified_base 3: mod_base = cm
  modified_base 4: mod_base = um
  modified_base 5: mod_base = gm
  modified_base 6: mod_base = gm
  modified_base 7: mod_base = OTHER; note = 2' Fluoro-uridine
  modified_base 8: mod_base = OTHER; note = 2' Fluoro-guanosine
  modified_base 9: mod_base = OTHER; note = 2' Fluoro-guanosine
  modified_base 10: mod_base = OTHER; note = 2' Fluoro-uridine
  modified_base 11: mod_base = OTHER; note = 2' Fluoro-cytidine
  modified_base 12: mod_base = cm
  modified_base 13: mod_base = um
  modified_base 14: mod_base = cm
  modified_base 15: mod_base = OTHER; note = 2'O-methyl-adenosine
  modified_base 16: mod_base = um
  modified_base 17: mod_base = gm
  modified_base 18: mod_base = gm
  modified_base 19: mod_base = OTHER; note = 2'-Fluoro-adenosine
  modified_base 20: mod_base = gm
  modified_base 21: mod_base = OTHER; note = 2'O-methyl-adenosine
  modified_base 1^2: mod_base = OTHER; note = phosphorothioate linkage
  modified_base 2^3: mod_base = OTHER; note = phosphorothioate linkage
tgctggtggtcctcatggaga

SEQ ID NO: 696 - RNA, 21 nt, synthetic construct
  source 1..21: mol_type = other RNA
  misc_feature 1..21: note = Description: ZPI siRNA sense strand: ETXS899; corresponding to SEQ ID NO: 256
  modified_base 1: mod_base = cm
  modified_base 2: mod_base = cm
  modified_base 3: mod_base = um
  modified_base 4: mod_base = um
  modified_base 5: mod_base = cm
  modified_base 6: mod_base = OTHER; note = 2'O-methyl-adenosine
  modified_base 7: mod_base = OTHER; note = 2' Fluoro-uridine
  modified_base 8: mod_base = OTHER; note = 2' Fluoro-cytidine
  modified_base 9: mod_base = OTHER; note = 2' Fluoro-cytidine
  modified_base 10: mod_base = OTHER; note = 2'-Fluoro-adenosine
  modified_base 11: mod_base = OTHER; note = 2' Fluoro-cytidine
  modified_base 12: mod_base = OTHER; note = 2'O-methyl-adenosine
  modified_base 13: mod_base = OTHER; note = 2'O-methyl-adenosine
  modified_base 14: mod_base = gm
  modified_base 15: mod_base = gm
  modified_base 16: mod_base = OTHER; note = 2'O-methyl-adenosine
  modified_base 17: mod_base = um
  modified_base 18: mod_base = um
  modified_base 19: mod_base = OTHER; note = 2' Fluoro-uridine
  modified_base 20: mod_base = um
  modified_base 21: mod_base = gm
  modified_base 1^2: mod_base = OTHER; note = phosphorothioate linkage
  modified_base 2^3: mod_base = OTHER; note = phosphorothioate linkage
ccttcatccacaaggattttg

SEQ ID NO: 697 - RNA, 21 nt, synthetic construct
  source 1..21: mol_type = other RNA
  misc_feature 1..21: note = Description: ZPI siRNA sense strand: ETXS901; corresponding to SEQ ID NO: 257
  modified_base 1: mod_base = gm
  modified_base 2: mod_base = OTHER; note = 2'O-methyl-adenosine
  modified_base 3: mod_base = OTHER; note = 2'O-methyl-adenosine
  modified_base 4: mod_base = OTHER; note = 2'O-methyl-adenosine
  modified_base 5: mod_base = gm
  modified_base 6: mod_base = OTHER; note = 2'O-methyl-adenosine
  modified_base 7: mod_base = OTHER; note = 2' Fluoro-uridine
  modified_base 8: mod_base = OTHER; note = 2' Fluoro-cytidine
  modified_base 9: mod_base = OTHER; note = 2' Fluoro-uridine
  modified_base 10: mod_base = OTHER; note = 2' Fluoro-cytidine
  modified_base 11: mod_base = OTHER; note = 2' Fluoro-cytidine
  modified_base 12: mod_base = OTHER; note = 2'O-methyl-adenosine
  modified_base 13: mod_base = um
  modified_base 14: mod_base = gm
  modified_base 15: mod_base = OTHER; note = 2'O-methyl-adenosine
  modified_base 16: mod_base = gm
  modified_base 17: mod_base = gm
  modified_base 18: mod_base = cm
  modified_base 19: mod_base = OTHER; note = 2'-Fluoro-adenosine
  modified_base 20: mod_base = cm
  modified_base 21: mod_base = gm
  modified_base 1^2: mod_base = OTHER; note = phosphorothioate linkage
  modified_base 2^3: mod_base = OTHER; note = phosphorothioate linkage
gaaagatctccatgaggcacg

SEQ ID NO: 698 - RNA, 21 nt, synthetic construct
  source 1..21: mol_type = other RNA
  misc_feature 1..21: note = Description: ZPI siRNA sense strand: ETXS903; corresponding to SEQ ID NO: 258
  modified_base 1: mod_base = um
  modified_base 2: mod_base = um
  modified_base 3: mod_base = cm
  modified_base 4: mod_base = OTHER; note = 2'O-methyl-adenosine
  modified_base 5: mod_base = um
  modified_base 6: mod_base = cm
  modified_base 7: mod_base = OTHER; note = 2' Fluoro-cytidine
  modified_base 8: mod_base = OTHER; note = 2'-Fluoro-adenosine
  modified_base 9: mod_base = OTHER; note = 2' Fluoro-cytidine
  modified_base 10: mod_base = OTHER; note = 2'-Fluoro-adenosine
  modified_base 11: mod_base = OTHER; note = 2'-Fluoro-adenosine
  modified_base 12: mod_base = gm
  modified_base 13: mod_base = gm
  modified_base 14: mod_base = OTHER; note = 2'O-methyl-adenosine
  modified_base 15: mod_base = um
  modified_base 16: mod_base = um
  modified_base 17: mod_base = um
  modified_base 18: mod_base = um
  modified_base 19: mod_base = OTHER; note = 2' Fluoro-guanosine
  modified_base 20: mod_base = OTHER; note = 2'O-methyl-adenosine
  modified_base 21: mod_base = um
  modified_base 1^2: mod_base = OTHER; note = phosphorothioate linkage
  modified_base 2^3: mod_base = OTHER; note = phosphorothioate linkage
ttcatccacaaggattttgat

SEQ ID NO: 699 - RNA, 21 nt, synthetic construct
  source 1..21: mol_type = other RNA
  misc_feature 1..21: note = Description: ZPI siRNA sense strand: ETXS905; corresponding to SEQ ID NO: 259
  modified_base 1: mod_base = um
  modified_base 2: mod_base = um
  modified_base 3: mod_base = um
  modified_base 4: mod_base = gm
  modified_base 5: mod_base = OTHER; note = 2'O-methyl-adenosine
  modified_base 6: mod_base = um
  modified_base 7: mod_base = OTHER; note = 2' Fluoro-guanosine
  modified_base 8: mod_base = OTHER; note = 2'-Fluoro-adenosine
  modified_base 9: mod_base = OTHER; note = 2' Fluoro-guanosine
  modified_base 10: mod_base = OTHER; note = 2'-Fluoro-adenosine
  modified_base 11: mod_base = OTHER; note = 2' Fluoro-uridine
  modified_base 12: mod_base = um
  modified_base 13: mod_base = OTHER; note = 2'O-methyl-adenosine
  modified_base 14: mod_base = OTHER; note = 2'O-methyl-adenosine
  modified_base 15: mod_base = um
  modified_base 16: mod_base = cm
  modified_base 17: mod_base = cm
  modified_base 18: mod_base = um
  modified_base 19: mod_base = OTHER; note = 2' Fluoro-guanosine
  modified_base 20: mod_base = OTHER; note = 2'O-methyl-adenosine
  modified_base 21: mod_base = OTHER; note = 2'O-methyl-adenosine
  modified_base 1^2: mod_base = OTHER; note = phosphorothioate linkage
  modified_base 2^3: mod_base = OTHER; note = phosphorothioate linkage
tttgatgagattaatcctgaa

SEQ ID NO: 700 - RNA, 21 nt, synthetic construct
  source 1..21: mol_type = other RNA
  misc_feature 1..21: note = Description: ZPI siRNA sense strand: ETXS907; corresponding to SEQ ID NO: 260
  modified_base 1: mod_base = um
  modified_base 2: mod_base = um
  modified_base 3: mod_base = gm
  modified_base 4: mod_base = cm
  modified_base 5: mod_base = cm
  modified_base 6: mod_base = um
  modified_base 7: mod_base = OTHER; note = 2' Fluoro-uridine
  modified_base 8: mod_base = OTHER; note = 2' Fluoro-cytidine
  modified_base 9: mod_base = OTHER; note = 2'-Fluoro-adenosine
  modified_base 10: mod_base = OTHER; note = 2' Fluoro-uridine
  modified_base 11: mod_base = OTHER; note = 2' Fluoro-cytidine
  modified_base 12: mod_base = cm
  modified_base 13: mod_base = OTHER; note = 2'O-methyl-adenosine
  modified_base 14: mod_base = cm
  modified_base 15: mod_base = OTHER; note = 2'O-methyl-adenosine
  modified_base 16: mod_base = OTHER; note = 2'O-methyl-adenosine
  modified_base 17: mod_base = gm
  modified_base 18: mod_base = gm
  modified_base 19: mod_base = OTHER; note = 2'-Fluoro-adenosine
  modified_base 20: mod_base = um
  modified_base 21: mod_base = um
  modified_base 1^2: mod_base = OTHER; note = phosphorothioate linkage
  modified_base 2^3: mod_base = OTHER; note = phosphorothioate linkage
ttgccttcatccacaaggatt

SEQ ID NO: 701 - RNA, 21 nt, synthetic construct
  source 1..21: mol_type = other RNA
  misc_feature 1..21: note = Description: ZPI siRNA sense strand: ETXS909; corresponding to SEQ ID NO: 261
  modified_base 1: mod_base = gm
  modified_base 2: mod_base = OTHER; note = 2'O-methyl-adenosine
  modified_base 3: mod_base = um
  modified_base 4: mod_base = cm
  modified_base 5: mod_base = um
  modified_base 6: mod_base = cm
  modified_base 7: mod_base = OTHER; note = 2' Fluoro-cytidine
  modified_base 8: mod_base = OTHER; note = 2'-Fluoro-adenosine
  modified_base 9: mod_base = OTHER; note = 2' Fluoro-uridine
  modified_base 10: mod_base = OTHER; note = 2' Fluoro-guanosine
  modified_base 11: mod_base = OTHER; note = 2'-Fluoro-adenosine
  modified_base 12: mod_base = gm
  modified_base 13: mod_base = gm
  modified_base 14: mod_base = cm
  modified_base 15: mod_base = OTHER; note = 2'O-methyl-adenosine
  modified_base 16: mod_base = cm
  modified_base 17: mod_base = gm
  modified_base 18: mod_base = OTHER; note = 2'O-methyl-adenosine
  modified_base 19: mod_base = OTHER; note = 2' Fluoro-uridine
  modified_base 20: mod_base = gm
  modified_base 21: mod_base = gm
  modified_base 1^2: mod_base = OTHER; note = phosphorothioate linkage
  modified_base 2^3: mod_base = OTHER; note = phosphorothioate linkage
gatctccatgaggcacgatgg

SEQ ID NO: 702 - RNA, 21 nt, synthetic construct
  source 1..21: mol_type = other RNA
  misc_feature 1..21: note = Description: ZPI siRNA sense strand: ETXS911; corresponding to SEQ ID NO: 242
  modified_base 1: mod_base = um
  modified_base 2: mod_base = gm
  modified_base 3: mod_base = cm
  modified_base 4: mod_base = cm
  modified_base 5: mod_base = um
  modified_base 6: mod_base = OTHER; note = 2' Fluoro-uridine
  modified_base 7: mod_base = OTHER; note = 2' Fluoro-cytidine
  modified_base 8: mod_base = OTHER; note = 2'O-methyl-adenosine
  modified_base 9: mod_base = OTHER; note = 2' Fluoro-uridine
  modified_base 10: mod_base = OTHER; note = 2' Fluoro-cytidine
  modified_base 11: mod_base = OTHER; note = 2' Fluoro-cytidine
  modified_base 12: mod_base = OTHER; note = 2'-Fluoro-adenosine
  modified_base 13: mod_base = cm
  modified_base 14: mod_base = OTHER; note = 2'O-methyl-adenosine
  modified_base 15: mod_base = OTHER; note = 2'O-methyl-adenosine
  modified_base 16: mod_base = gm
  modified_base 17: mod_base = gm
  modified_base 18: mod_base = OTHER; note = 2'O-methyl-adenosine
  modified_base 19: mod_base = um
  modified_base 20: mod_base = um
  modified_base 21: mod_base = um
  modified_base 1^2: mod_base = OTHER; note = phosphorothioate linkage
  modified_base 2^3: mod_base = OTHER; note = phosphorothioate linkage
tgccttcatccacaaggattt

SEQ ID NO: 703 - RNA, 21 nt, synthetic construct
  source 1..21: mol_type = other RNA
  misc_feature 1..21: note = Description: ZPI siRNA sense strand: ETXS913; corresponding to SEQ ID NO: 243
  modified_base 1: mod_base = um
  modified_base 2: mod_base = gm
  modified_base 3: mod_base = cm
  modified_base 4: mod_base = gm
  modified_base 5: mod_base = OTHER; note = 2'O-methyl-adenosine
  modified_base 6: mod_base = OTHER; note = 2'-Fluoro-adenosine
  modified_base 7: mod_base = OTHER; note = 2'-Fluoro-adenosine
  modified_base 8: mod_base = gm
  modified_base 9: mod_base = OTHER; note = 2'-Fluoro-adenosine
  modified_base 10: mod_base = OTHER; note = 2' Fluoro-uridine
  modified_base 11: mod_base = OTHER; note = 2' Fluoro-cytidine
  modified_base 12: mod_base = OTHER; note = 2' Fluoro-uridine
  modified_base 13: mod_base = cm
  modified_base 14: mod_base = cm
  modified_base 15: mod_base = OTHER; note = 2'O-methyl-adenosine
  modified_base 16: mod_base = um
  modified_base 17: mod_base = gm
  modified_base 18: mod_base = OTHER; note = 2'O-methyl-adenosine
  modified_base 19: mod_base = gm
  modified_base 20: mod_base = gm
  modified_base 21: mod_base = cm
  modified_base 1^2: mod_base = OTHER; note = phosphorothioate linkage
  modified_base 2^3: mod_base = OTHER; note = phosphorothioate linkage
tgcgaaagatctccatgaggc

SEQ ID NO: 704 - RNA, 21 nt, synthetic construct
  source 1..21: mol_type = other RNA
  misc_feature 1..21: note = Description: ZPI siRNA sense strand: ETXS915; corresponding to SEQ ID NO: 244
  modified_base 1: mod_base = gm
  modified_base 2: mod_base = cm
  modified_base 3: mod_base = um
  modified_base 4: mod_base = gm
  modified_base 5: mod_base = gm
  modified_base 6: mod_base = OTHER; note = 2' Fluoro-uridine
  modified_base 7: mod_base = OTHER; note = 2' Fluoro-guanosine
  modified_base 8: mod_base = gm
  modified_base 9: mod_base = OTHER; note = 2' Fluoro-uridine
  modified_base 10: mod_base = OTHER; note = 2' Fluoro-cytidine
  modified_base 11: mod_base = OTHER; note = 2' Fluoro-cytidine
  modified_base 12: mod_base = OTHER; note = 2' Fluoro-uridine
  modified_base 13: mod_base = cm
  modified_base 14: mod_base = OTHER; note = 2'O-methyl-adenosine
  modified_base 15: mod_base = um
  modified_base 16: mod_base = gm
  modified_base 17: mod_base = gm
  modified_base 18: mod_base = OTHER; note = 2'O-methyl-adenosine
  modified_base 19: mod_base = gm
  modified_base 20: mod_base = OTHER; note = 2'O-methyl-adenosine
  modified_base 21: mod_base = OTHER; note = 2'O-methyl-adenosine
  modified_base 1^2: mod_base = OTHER; note = phosphorothioate linkage
  modified_base 2^3: mod_base = OTHER; note = phosphorothioate linkage
gctggtggtcctcatggagaa

SEQ ID NO: 705 - RNA, 21 nt, synthetic construct
  source 1..21: mol_type = other RNA
  misc_feature 1..21: note = Description: ZPI siRNA sense strand: ETXS917; corresponding to SEQ ID NO: 245
  modified_base 1: mod_base = gm
  modified_base 2: mod_base = cm
  modified_base 3: mod_base = gm
  modified_base 4: mod_base = OTHER; note = 2'O-methyl-adenosine
  modified_base 5: mod_base = OTHER; note = 2'O-methyl-adenosine
  modified_base 6: mod_base = OTHER; note = 2'-Fluoro-adenosine
  modified_base 7: mod_base = OTHER; note = 2' Fluoro-guanosine
  modified_base 8: mod_base = OTHER; note = 2'O-methyl-adenosine
  modified_base 9: mod_base = OTHER; note = 2' Fluoro-uridine
  modified_base 10: mod_base = OTHER; note = 2' Fluoro-cytidine
  modified_base 11: mod_base = OTHER; note = 2' Fluoro-uridine
  modified_base 12: mod_base = OTHER; note = 2' Fluoro-cytidine
  modified_base 13: mod_base = cm
  modified_base 14: mod_base = OTHER; note = 2'O-methyl-adenosine
  modified_base 15: mod_base = um
  modified_base 16: mod_base = gm
  modified_base 17: mod_base = OTHER; note = 2'O-methyl-adenosine
  modified_base 18: mod_base = gm
  modified_base 19: mod_base = gm
  modified_base 20: mod_base = cm
  modified_base 21: mod_base = OTHER; note = 2'O-methyl-adenosine
  modified_base 1^2: mod_base = OTHER; note = phosphorothioate linkage
  modified_base 2^3: mod_base = OTHER; note = phosphorothioate linkage
gcgaaagatctccatgaggca

SEQ ID NO: 706 - RNA, 21 nt, synthetic construct
  source 1..21: mol_type = other RNA
  misc_feature 1..21: note = Description: ZPI siRNA sense strand: ETXS919; corresponding to SEQ ID NO: 246
  modified_base 1: mod_base = gm
  modified_base 2: mod_base = um
  modified_base 3: mod_base = OTHER; note = 2'O-methyl-adenosine
  modified_base 4: mod_base = um
  modified_base 5: mod_base = gm
  modified_base 6: mod_base = OTHER; note = 2'-Fluoro-adenosine
  modified_base 7: mod_base = OTHER; note = 2' Fluoro-guanosine
  modified_base 8: mod_base = OTHER; note = 2'O-methyl-adenosine
  modified_base 9: mod_base = OTHER; note = 2' Fluoro-uridine
  modified_base 10: mod_base = OTHER; note = 2' Fluoro-guanosine
  modified_base 11: mod_base = OTHER; note = 2' Fluoro-cytidine
  modified_base 12: mod_base = OTHER; note = 2'-Fluoro-adenosine
  modified_base 13: mod_base = um
  modified_base 14: mod_base = gm
  modified_base 15: mod_base = OTHER; note = 2'O-methyl-adenosine
  modified_base 16: mod_base = gm
  modified_base 17: mod_base = cm
  modified_base 18: mod_base = um
  modified_base 19: mod_base = gm
  modified_base 20: mod_base = cm
  modified_base 21: mod_base = um
  modified_base 1^2: mod_base = OTHER; note = phosphorothioate linkage
  modified_base 2^3: mod_base = OTHER; note = phosphorothioate linkage
gtatgagatgcatgagctgct

SEQ ID NO: 707 - RNA, 21 nt, synthetic construct
  source 1..21: mol_type = other RNA
  misc_feature 1..21: note = Description: ZPI siRNA sense strand: ETXS921; corresponding to SEQ ID NO: 247
  modified_base 1: mod_base = gm
  modified_base 2: mod_base = um
  modified_base 3: mod_base = um
  modified_base 4: mod_base = um
  modified_base 5: mod_base = gm
  modified_base 6: mod_base = OTHER; note = 2'-Fluoro-adenosine
  modified_base 7: mod_base = OTHER; note = 2' Fluoro-uridine
  modified_base 8: mod_base = gm
  modified_base 9: mod_base = OTHER; note = 2'-Fluoro-adenosine
  modified_base 10: mod_base = OTHER; note = 2' Fluoro-guanosine
  modified_base 11: mod_base = OTHER; note = 2'-Fluoro-adenosine
  modified_base 12: mod_base = OTHER; note = 2' Fluoro-uridine
  modified_base 13: mod_base = um
  modified_base 14: mod_base = OTHER; note = 2'O-methyl-adenosine
  modified_base 15: mod_base = OTHER; note = 2'O-methyl-adenosine
  modified_base 16: mod_base = um
  modified_base 17: mod_base = cm
  modified_base 18: mod_base = cm
  modified_base 19: mod_base = um
  modified_base 20: mod_base = gm
  modified_base 21: mod_base = OTHER; note = 2'O-methyl-adenosine
  modified_base 1^2: mod_base = OTHER; note = phosphorothioate linkage
  modified_base 2^3: mod_base = OTHER; note = phosphorothioate linkage
gtttgatgagattaatcctga

SEQ ID NO: 708 - RNA, 21 nt, synthetic construct
  source 1..21: mol_type = other RNA
  misc_feature 1..21: note = Description: ZPI siRNA sense strand: ETXS923; corresponding to SEQ ID NO: 248
  modified_base 1: mod_base = um
  modified_base 2: mod_base = gm
  modified_base 3: mod_base = OTHER; note = 2'O-methyl-adenosine
  modified_base 4: mod_base = gm
  modified_base 5: mod_base = OTHER; note = 2'O-methyl-adenosine
  modified_base 6: mod_base = OTHER; note = 2' Fluoro-uridine
  modified_base 7: mod_base = OTHER; note = 2' Fluoro-uridine
  modified_base 8: mod_base = OTHER; note = 2'O-methyl-adenosine
  modified_base 9: mod_base = OTHER; note = 2'-Fluoro-adenosine
  modified_base 10: mod_base = OTHER; note = 2' Fluoro-uridine
  modified_base 11: mod_base = OTHER; note = 2' Fluoro-cytidine
  modified_base 12: mod_base = OTHER; note = 2' Fluoro-cytidine
  modified_base 13: mod_base = um
  modified_base 14: mod_base = gm
  modified_base 15: mod_base = OTHER; note = 2'O-methyl-adenosine
  modified_base 16: mod_base = OTHER; note = 2'O-methyl-adenosine
  modified_base 17: mod_base = OTHER; note = 2'O-methyl-adenosine
  modified_base 18: mod_base = cm
  modified_base 19: mod_base = cm
  modified_base 20: mod_base = OTHER; note = 2'O-methyl-adenosine
  modified_base 21: mod_base = OTHER; note = 2'O-methyl-adenosine
  modified_base 1^2: mod_base = OTHER; note = phosphorothioate linkage
  modified_base 2^3: mod_base = OTHER; note = phosphorothioate linkage
tgagattaatcctgaaaccaa

SEQ ID NO: 709 - RNA, 21 nt, synthetic construct
  source 1..21: mol_type = other RNA
  misc_feature 1..21: note = Description: ZPI siRNA sense strand: ETXS925; corresponding to SEQ ID NO: 249
  modified_base 1: mod_base = um
  modified_base 2: mod_base = gm
  modified_base 3: mod_base = OTHER; note = 2'O-methyl-adenosine
  modified_base 4: mod_base = um
  modified_base 5: mod_base = gm
  modified_base 6: mod_base = OTHER; note = 2'-Fluoro-adenosine
  modified_base 7: mod_base = OTHER; note = 2' Fluoro-guanosine
  modified_base 8: mod_base = OTHER; note = 2'O-methyl-adenosine
  modified_base 9: mod_base = OTHER; note = 2' Fluoro-uridine
  modified_base 10: mod_base = OTHER; note = 2' Fluoro-uridine
  modified_base 11: mod_base = OTHER; note = 2'-Fluoro-adenosine
  modified_base 12: mod_base = OTHER; note = 2'-Fluoro-adenosine
  modified_base 13: mod_base = um
  modified_base 14: mod_base = cm
  modified_base 15: mod_base = cm
  modified_base 16: mod_base = um
  modified_base 17: mod_base = gm
  modified_base 18: mod_base = OTHER; note = 2'O-methyl-adenosine
  modified_base 19: mod_base = OTHER; note = 2'O-methyl-adenosine
  modified_base 20: mod_base = OTHER; note = 2'O-methyl-adenosine
  modified_base 21: mod_base = cm
  modified_base 1^2: mod_base = OTHER; note = phosphorothioate linkage
  modified_base 2^3: mod_base = OTHER; note = phosphorothioate linkage
tgatgagattaatcctgaaac

SEQ ID NO: 710 - RNA, 21 nt, synthetic construct
  source 1..21: mol_type = other RNA
  misc_feature 1..21: note = Description: ZPI siRNA sense strand: ETXS927; corresponding to SEQ ID NO: 250
  modified_base 1: mod_base = OTHER; note = 2'O-methyl-adenosine
  modified_base 2: mod_base = um
  modified_base 3: mod_base = gm
  modified_base 4: mod_base = OTHER; note = 2'O-methyl-adenosine
  modified_base 5: mod_base = gm
  modified_base 6: mod_base = OTHER; note = 2'-Fluoro-adenosine
  modified_base 7: mod_base = OTHER; note = 2' Fluoro-uridine
  modified_base 8: mod_base = um
  modified_base 9: mod_base = OTHER; note = 2'-Fluoro-adenosine
  modified_base 10: mod_base = OTHER; note = 2'-Fluoro-adenosine
  modified_base 11: mod_base = OTHER; note = 2' Fluoro-uridine
  modified_base 12: mod_base = OTHER; note = 2' Fluoro-cytidine
  modified_base 13: mod_base = cm
  modified_base 14: mod_base = um
  modified_base 15: mod_base = gm
  modified_base 16: mod_base = OTHER; note = 2'O-methyl-adenosine
  modified_base 17: mod_base = OTHER; note = 2'O-methyl-adenosine
  modified_base 18: mod_base = OTHER; note = 2'O-methyl-adenosine
  modified_base 19: mod_base = cm
  modified_base 20: mod_base = cm
  modified_base 21: mod_base = OTHER; note = 2'O-methyl-adenosine
  modified_base 1^2: mod_base = OTHER; note = phosphorothioate linkage
  modified_base 2^3: mod_base = OTHER; note = phosphorothioate linkage
atgagattaatcctgaaacca

SEQ ID NO: 711 - RNA, 21 nt, synthetic construct
  source 1..21: mol_type = other RNA
  misc_feature 1..21: note = Description: ZPI siRNA sense strand: ETXS929; corresponding to SEQ ID NO: 251
  modified_base 1: mod_base = gm
  modified_base 2: mod_base = OTHER; note = 2'O-methyl-adenosine
  modified_base 3: mod_base = um
  modified_base 4: mod_base = gm
  modified_base 5: mod_base = OTHER; note = 2'O-methyl-adenosine
  modified_base 6: mod_base = OTHER; note = 2' Fluoro-guanosine
  modified_base 7: mod_base = OTHER; note = 2'-Fluoro-adenosine
  modified_base 8: mod_base = um
  modified_base 9: mod_base = OTHER; note = 2' Fluoro-uridine
  modified_base 10: mod_base = OTHER; note = 2'-Fluoro-adenosine
  modified_base 11: mod_base = OTHER; note = 2'-Fluoro-adenosine
  modified_base 12: mod_base = OTHER; note = 2' Fluoro-uridine
  modified_base 13: mod_base = cm
  modified_base 14: mod_base = cm
  modified_base 15: mod_base = um
  modified_base 16: mod_base = gm
  modified_base 17: mod_base = OTHER; note = 2'O-methyl-adenosine
  modified_base 18: mod_base = OTHER; note = 2'O-methyl-adenosine
  modified_base 19: mod_base = OTHER; note = 2'O-methyl-adenosine
  modified_base 20: mod_base = cm
  modified_base 21: mod_base = cm
  modified_base 1^2: mod_base = OTHER; note = phosphorothioate linkage
  modified_base 2^3: mod_base = OTHER; note = phosphorothioate linkage
gatgagattaatcctgaaacc

SEQ ID NO: 712 - RNA, 21 nt, synthetic construct
  source 1..21: mol_type = other RNA
  misc_feature 1..21: note = Description: ZPI siRNA sense strand: ETXS931; corresponding to SEQ ID NO: 252
  modified_base 1: mod_base = cm
  modified_base 2: mod_base = um
  modified_base 3: mod_base = gm
  modified_base 4: mod_base = um
  modified_base 5: mod_base = um
  modified_base 6: mod_base = OTHER; note = 2' Fluoro-uridine
  modified_base 7: mod_base = OTHER; note = 2' Fluoro-guanosine
  modified_base 8: mod_base = OTHER; note = 2'O-methyl-adenosine
  modified_base 9: mod_base = OTHER; note = 2' Fluoro-uridine
  modified_base 10: mod_base = OTHER; note = 2' Fluoro-guanosine
  modified_base 11: mod_base = OTHER; note = 2'-Fluoro-adenosine
  modified_base 12: mod_base = OTHER; note = 2' Fluoro-guanosine
  modified_base 13: mod_base = OTHER; note = 2'O-methyl-adenosine
  modified_base 14: mod_base = um
  modified_base 15: mod_base = um
  modified_base 16: mod_base = OTHER; note = 2'O-methyl-adenosine
  modified_base 17: mod_base = OTHER; note = 2'O-methyl-adenosine
  modified_base 18: mod_base = um
  modified_base 19: mod_base = cm
  modified_base 20: mod_base = cm
  modified_base 21: mod_base = um
  modified_base 1^2: mod_base = OTHER; note = phosphorothioate linkage
  modified_base 2^3: mod_base = OTHER; note = phosphorothioate linkage
ctgtttgatgagattaatcct

SEQ ID NO: 713 - RNA, 21 nt, synthetic construct
  source 1..21: mol_type = other RNA
  misc_feature 1..21: note = Description: ZPI siRNA sense strand: ETXS933; corresponding to SEQ ID NO: 253
  modified_base 1: mod_base = um
  modified_base 2: mod_base = um
  modified_base 3: mod_base = um
  modified_base 4: mod_base = um
  modified_base 5: mod_base = gm
  modified_base 6: mod_base = OTHER; note = 2' Fluoro-cytidine
  modified_base 7: mod_base = OTHER; note = 2' Fluoro-cytidine
  modified_base 8: mod_base = um
  modified_base 9: mod_base = OTHER; note = 2' Fluoro-uridine
  modified_base 10: mod_base = OTHER; note = 2' Fluoro-cytidine
  modified_base 11: mod_base = OTHER; note = 2'-Fluoro-adenosine
  modified_base 12: mod_base = OTHER; note = 2' Fluoro-uridine
  modified_base 13: mod_base = cm
  modified_base 14: mod_base = cm
  modified_base 15: mod_base = OTHER; note = 2'O-methyl-adenosine
  modified_base 16: mod_base = cm
  modified_base 17: mod_base = OTHER; note = 2'O-methyl-adenosine
  modified_base 18: mod_base = OTHER; note = 2'O-methyl-adenosine
  modified_base 19: mod_base = gm
  modified_base 20: mod_base = gm
  modified_base 21: mod_base = OTHER; note = 2'O-methyl-adenosine
  modified_base 1^2: mod_base = OTHER; note = phosphorothioate linkage
  modified_base 2^3: mod_base = OTHER; note = phosphorothioate linkage
ttttgccttcatccacaagga

SEQ ID NO: 714 - RNA, 21 nt, synthetic construct
  source 1..21: mol_type = other RNA
  misc_feature 1..21: note = Description: ZPI siRNA sense strand: ETXS935; corresponding to SEQ ID NO: 254
  modified_base 1: mod_base = cm
  modified_base 2: mod_base = gm
  modified_base 3: mod_base = OTHER; note = 2'O-methyl-adenosine
  modified_base 4: mod_base = OTHER; note = 2'O-methyl-adenosine
  modified_base 5: mod_base = OTHER; note = 2'O-methyl-adenosine
  modified_base 6: mod_base = OTHER; note = 2' Fluoro-guanosine
  modified_base 7: mod_base = OTHER; note = 2'-Fluoro-adenosine
  modified_base 8: mod_base = um
  modified_base 9: mod_base = OTHER; note = 2' Fluoro-cytidine
  modified_base 10: mod_base = OTHER; note = 2' Fluoro-uridine
  modified_base 11: mod_base = OTHER; note = 2' Fluoro-cytidine
  modified_base 12: mod_base = OTHER; note = 2' Fluoro-cytidine
  modified_base 13: mod_base = OTHER; note = 2'O-methyl-adenosine
  modified_base 14: mod_base = um
  modified_base 15: mod_base = gm
  modified_base 16: mod_base = OTHER; note = 2'O-methyl-adenosine
  modified_base 17: mod_base = gm
  modified_base 18: mod_base = gm
  modified_base 19: mod_base = cm
  modified_base 20: mod_base = OTHER; note = 2'O-methyl-adenosine
  modified_base 21: mod_base = cm
  modified_base 1^2: mod_base = OTHER; note = phosphorothioate linkage
  modified_base 2^3: mod_base = OTHER; note = phosphorothioate linkage
cgaaagatctccatgaggcac

SEQ ID NO: 715 - RNA, 21 nt, synthetic construct
  source 1..21: mol_type = other RNA
  misc_feature 1..21: note = Description: ZPI siRNA sense strand: ETXS937; corresponding to SEQ ID NO: 255
  modified_base 1: mod_base = um
  modified_base 2: mod_base = gm
  modified_base 3: mod_base = cm
  modified_base 4: mod_base = um
  modified_base 5: mod_base = gm
  modified_base 6: mod_base = OTHER; note = 2' Fluoro-guanosine
  modified_base 7: mod_base = OTHER; note = 2' Fluoro-uridine
  modified_base 8: mod_base = gm
  modified_base 9: mod_base = OTHER; note = 2' Fluoro-guanosine
  modified_base 10: mod_base = OTHER; note = 2' Fluoro-uridine
  modified_base 11: mod_base = OTHER; note = 2' Fluoro-cytidine
  modified_base 12: mod_base = OTHER; note = 2' Fluoro-cytidine
  modified_base 13: mod_base = um
  modified_base 14: mod_base = cm
  modified_base 15: mod_base = OTHER; note = 2'O-methyl-adenosine
  modified_base 16: mod_base = um
  modified_base 17: mod_base = gm
  modified_base 18: mod_base = gm
  modified_base 19: mod_base = OTHER; note = 2'O-methyl-adenosine
  modified_base 20: mod_base = gm
  modified_base 21: mod_base = OTHER; note = 2'O-methyl-adenosine
  modified_base 1^2: mod_base = OTHER; note = phosphorothioate linkage
  modified_base 2^3: mod_base = OTHER; note = phosphorothioate linkage
tgctggtggtcctcatggaga

SEQ ID NO: 716 - RNA, 21 nt, synthetic construct
  source 1..21: mol_type = other RNA
  misc_feature 1..21: note = Description: ZPI siRNA sense strand: ETXS939; corresponding to SEQ ID NO: 256
  modified_base 1: mod_base = cm
  modified_base 2: mod_base = cm
  modified_base 3: mod_base = um
  modified_base 4: mod_base = um
  modified_base 5: mod_base = cm
  modified_base 6: mod_base = OTHER; note = 2'-Fluoro-adenosine
  modified_base 7: mod_base = OTHER; note = 2' Fluoro-uridine
  modified_base 8: mod_base = cm
  modified_base 9: mod_base = OTHER; note = 2' Fluoro-cytidine
  modified_base 10: mod_base = OTHER; note = 2'-Fluoro-adenosine
  modified_base 11: mod_base = OTHER; note = 2' Fluoro-cytidine
  modified_base 12: mod_base = OTHER; note = 2'-Fluoro-adenosine
  modified_base 13: mod_base = OTHER; note = 2'O-methyl-adenosine
  modified_base 14: mod_base = gm
  modified_base 15: mod_base = gm
  modified_base 16: mod_base = OTHER; note = 2'O-methyl-adenosine
  modified_base 17: mod_base = um
  modified_base 18: mod_base = um
  modified_base 19: mod_base = um
  modified_base 20: mod_base = um
  modified_base 21: mod_base = gm
  modified_base 1^2: mod_base = OTHER; note = phosphorothioate linkage
  modified_base 2^3: mod_base = OTHER; note = phosphorothioate linkage
ccttcatccacaaggattttg

SEQ ID NO: 717 - RNA, 21 nt, synthetic construct
  source 1..21: mol_type = other RNA
  misc_feature 1..21: note = Description: ZPI siRNA sense strand: ETXS941; corresponding to SEQ ID NO: 257
  modified_base 1: mod_base = gm
  modified_base 2: mod_base = OTHER; note = 2'O-methyl-adenosine
  modified_base 3: mod_base = OTHER; note = 2'O-methyl-adenosine
  modified_base 4: mod_base = OTHER; note = 2'O-methyl-adenosine
  modified_base 5: mod_base = gm
  modified_base 6: mod_base = OTHER; note = 2'-Fluoro-adenosine
  modified_base 7: mod_base = OTHER; note = 2' Fluoro-uridine
  modified_base 8: mod_base = cm
  modified_base 9: mod_base = OTHER; note = 2' Fluoro-uridine
  modified_base 10: mod_base = OTHER; note = 2' Fluoro-cytidine
  modified_base 11: mod_base = OTHER; note = 2' Fluoro-cytidine
  modified_base 12: mod_base = OTHER; note = 2'-Fluoro-adenosine
  modified_base 13: mod_base = um
  modified_base 14: mod_base = gm
  modified_base 15: mod_base = OTHER; note = 2'O-methyl-adenosine
  modified_base 16: mod_base = gm
  modified_base 17: mod_base = gm
  modified_base 18: mod_base = cm
  modified_base 19: mod_base = OTHER; note = 2'O-methyl-adenosine
  modified_base 20: mod_base = cm
  modified_base 21: mod_base = gm
  modified_base 1^2: mod_base = OTHER; note = phosphorothioate linkage
  modified_base 2^3: mod_base = OTHER; note = phosphorothioate linkage
gaaagatctccatgaggcacg

SEQ ID NO: 718 - RNA, 21 nt, synthetic construct
  source 1..21: mol_type = other RNA
  misc_feature 1..21: note = Description: ZPI siRNA sense strand: ETXS943; corresponding to SEQ ID NO: 258
  modified_base 1: mod_base = um
  modified_base 2: mod_base = um
  modified_base 3: mod_base = cm
  modified_base 4: mod_base = OTHER; note = 2'O-methyl-adenosine
  modified_base 5: mod_base = um
  modified_base 6: mod_base = OTHER; note = 2' Fluoro-cytidine
  modified_base 7: mod_base = OTHER; note = 2' Fluoro-cytidine
  modified_base 8: mod_base = OTHER; note = 2'O-methyl-adenosine
  modified_base 9: mod_base = OTHER; note = 2' Fluoro-cytidine
  modified_base 10: mod_base = OTHER; note = 2'-Fluoro-adenosine
  modified_base 11: mod_base = OTHER; note = 2'-Fluoro-adenosine
  modified_base 12: mod_base = OTHER; note = 2' Fluoro-guanosine
  modified_base 13: mod_base = gm
  modified_base 14: mod_base = OTHER; note = 2'O-methyl-adenosine
  modified_base 15: mod_base = um
  modified_base 16: mod_base = um
  modified_base 17: mod_base = um
  modified_base 18: mod_base = um
  modified_base 19: mod_base = gm
  modified_base 20: mod_base = OTHER; note = 2'O-methyl-adenosine
  modified_base 21: mod_base = um
  modified_base 1^2: mod_base = OTHER; note = phosphorothioate linkage
  modified_base 2^3: mod_base = OTHER; note = phosphorothioate linkage
ttcatccacaaggattttgat

SEQ ID NO: 719 - RNA, 21 nt, synthetic construct
  source 1..21: mol_type = other RNA
  misc_feature 1..21: note = Description: ZPI siRNA sense strand: ETXS945; corresponding to SEQ ID NO: 259
  modified_base 1: mod_base = um
  modified_base 2: mod_base = um
  modified_base 3: mod_base = um
  modified_base 4: mod_base = gm
  modified_base 5: mod_base = OTHER; note = 2'O-methyl-adenosine
  modified_base 6: mod_base = OTHER; note = 2' Fluoro-uridine
  modified_base 7: mod_base = OTHER; note = 2' Fluoro-guanosine
  modified_base 8: mod_base = OTHER; note = 2'O-methyl-adenosine
  modified_base 9: mod_base = OTHER; note = 2' Fluoro-guanosine
  modified_base 10: mod_base = OTHER; note = 2'-Fluoro-adenosine
  modified_base 11: mod_base = OTHER; note = 2' Fluoro-uridine
  modified_base 12: mod_base = OTHER; note = 2' Fluoro-uridine
  modified_base 13: mod_base = OTHER; note = 2'O-methyl-adenosine
  modified_base 14: mod_base = OTHER; note = 2'O-methyl-adenosine
  modified_base 15: mod_base = um
  modified_base 16: mod_base = cm
  modified_base 17: mod_base = cm
  modified_base 18: mod_base = um
  modified_base 19: mod_base = gm
  modified_base 20: mod_base = OTHER; note = 2'O-methyl-adenosine
  modified_base 21: mod_base = OTHER; note = 2'O-methyl-adenosine
  modified_base 1^2: mod_base = OTHER; note = phosphorothioate linkage
  modified_base 2^3: mod_base = OTHER; note = phosphorothioate linkage
tttgatgagattaatcctgaa

SEQ ID NO: 720 - RNA, 21 nt, synthetic construct
  source 1..21: mol_type = other RNA
  misc_feature 1..21: note = Description: ZPI siRNA sense strand: ETXS947; corresponding to SEQ ID NO: 260
  modified_base 1: mod_base = um
  modified_base 2: mod_base = um
  modified_base 3: mod_base = gm
  modified_base 4: mod_base = cm
  modified_base 5: mod_base = cm
  modified_base 6: mod_base = OTHER; note = 2' Fluoro-uridine
  modified_base 7: mod_base = OTHER; note = 2' Fluoro-uridine
  modified_base 8: mod_base = cm
  modified_base 9: mod_base = OTHER; note = 2'-Fluoro-adenosine
  modified_base 10: mod_base = OTHER; note = 2' Fluoro-uridine
  modified_base 11: mod_base = OTHER; note = 2' Fluoro-cytidine
  modified_base 12: mod_base = OTHER; note = 2' Fluoro-cytidine
  modified_base 13: mod_base = OTHER; note = 2'O-methyl-adenosine
  modified_base 14: mod_base = cm
  modified_base 15: mod_base = OTHER; note = 2'O-methyl-adenosine
  modified_base 16: mod_base = OTHER; note = 2'O-methyl-adenosine
  modified_base 17: mod_base = gm
  modified_base 18: mod_base = gm
  modified_base 19: mod_base = OTHER; note = 2'O-methyl-adenosine
  modified_base 20: mod_base = um
  modified_base 21: mod_base = um
  modified_base 1^2: mod_base = OTHER; note = phosphorothioate linkage
  modified_base 2^3: mod_base = OTHER; note = phosphorothioate linkage
ttgccttcatccacaaggatt

SEQ ID NO: 721 - RNA, 21 nt, synthetic construct
  source 1..21: mol_type = other RNA
  misc_feature 1..21: note = Description: ZPI siRNA sense strand: ETXS949; corresponding to SEQ ID NO: 261
  modified_base 1: mod_base = gm
  modified_base 2: mod_base = OTHER; note = 2'O-methyl-adenosine
  modified_base 3: mod_base = um
  modified_base 4: mod_base = cm
  modified_base 5: mod_base = um
  modified_base 6: mod_base = OTHER; note = 2' Fluoro-cytidine
  modified_base 7: mod_base = OTHER; note = 2' Fluoro-cytidine
  modified_base 8: mod_base = OTHER; note = 2'O-methyl-adenosine
  modified_base 9: mod_base = OTHER; note = 2' Fluoro-uridine
  modified_base 10: mod_base = OTHER; note = 2' Fluoro-guanosine
  modified_base 11: mod_base = OTHER; note = 2'-Fluoro-adenosine
  modified_base 12: mod_base = OTHER; note = 2' Fluoro-guanosine
  modified_base 13: mod_base = gm
  modified_base 14: mod_base = cm
  modified_base 15: mod_base = OTHER; note = 2'O-methyl-adenosine
  modified_base 16: mod_base = cm
  modified_base 17: mod_base = gm
  modified_base 18: mod_base = OTHER; note = 2'O-methyl-adenosine
  modified_base 19: mod_base = um
  modified_base 20: mod_base = gm
  modified_base 21: mod_base = gm
  modified_base 1^2: mod_base = OTHER; note = phosphorothioate linkage
  modified_base 2^3: mod_base = OTHER; note = phosphorothioate linkage
gatctccatgaggcacgatgg

SEQ ID NO: 722 - RNA, 21 nt, synthetic construct
  source 1..21: mol_type = other RNA
  misc_feature 1..21: note = Description: ZPI siRNA sense strand: ETXS951; corresponding to SEQ ID NO: 242
  modified_base 1: mod_base = um
  modified_base 2: mod_base = gm
  modified_base 3: mod_base = cm
  modified_base 4: mod_base = cm
  modified_base 5: mod_base = um
  modified_base 6: mod_base = um
  modified_base 7: mod_base = OTHER; note = 2' Fluoro-cytidine
  modified_base 8: mod_base = OTHER; note = 2'O-methyl-adenosine
  modified_base 9: mod_base = OTHER; note = 2' Fluoro-uridine
  modified_base 10: mod_base = OTHER; note = 2' Fluoro-cytidine
  modified_base 11: mod_base = OTHER; note = 2' Fluoro-cytidine
  modified_base 12: mod_base = OTHER; note = 2'-Fluoro-adenosine
  modified_base 13: mod_base = cm
  modified_base 14: mod_base = OTHER; note = 2'O-methyl-adenosine
  modified_base 15: mod_base = OTHER; note = 2'O-methyl-adenosine
  modified_base 16: mod_base = gm
  modified_base 17: mod_base = gm
  modified_base 18: mod_base = OTHER; note = 2'O-methyl-adenosine
  modified_base 19: mod_base = um
  modified_base 20: mod_base = um
  modified_base 21: mod_base = um
  modified_base 1^2: mod_base = OTHER; note = phosphorothioate linkage
  modified_base 2^3: mod_base = OTHER; note = phosphorothioate linkage
tgccttcatccacaaggattt

SEQ ID NO: 723 - RNA, 21 nt, synthetic construct
  source 1..21: mol_type = other RNA
  misc_feature 1..21: note = Description: ZPI siRNA sense strand: ETXS953; corresponding to SEQ ID NO: 243
  modified_base 1: mod_base = um
  modified_base 2: mod_base = gm
  modified_base 3: mod_base = cm
  modified_base 4: mod_base = gm
  modified_base 5: mod_base = OTHER; note = 2'O-methyl-adenosine
  modified_base 6: mod_base = OTHER; note = 2'O-methyl-adenosine
  modified_base 7: mod_base = OTHER; note = 2'-Fluoro-adenosine
  modified_base 8: mod_base = gm
  modified_base 9: mod_base = OTHER; note = 2'-Fluoro-adenosine
  modified_base 10: mod_base = OTHER; note = 2' Fluoro-uridine
  modified_base 11: mod_base = OTHER; note = 2' Fluoro-cytidine
  modified_base 12: mod_base = OTHER; note = 2' Fluoro-uridine
  modified_base 13: mod_base = cm
  modified_base 14: mod_base = cm
  modified_base 15: mod_base = OTHER; note = 2'O-methyl-adenosine
  modified_base 16: mod_base = um
  modified_base 17: mod_base = gm
  modified_base 18: mod_base = OTHER; note = 2'O-methyl-adenosine
  modified_base 19: mod_base = gm
  modified_base 20: mod_base = gm
  modified_base 21: mod_base = cm
  modified_base 1^2: mod_base = OTHER; note = phosphorothioate linkage
  modified_base 2^3: mod_base = OTHER; note = phosphorothioate linkage
tgcgaaagatctccatgaggc

SEQ ID NO: 724 - RNA, 21 nt, synthetic construct
  source 1..21: mol_type = other RNA
  misc_feature 1..21: note = Description: ZPI siRNA sense strand: ETXS955; corresponding to SEQ ID NO: 244
  modified_base 1: mod_base = gm
  modified_base 2: mod_base = cm
  modified_base 3: mod_base = um
  modified_base 4: mod_base = gm
  modified_base 5: mod_base = gm
  modified_base 6: mod_base = um
  modified_base 7: mod_base = OTHER; note = 2' Fluoro-guanosine
  modified_base 8: mod_base = gm
  modified_base 9: mod_base = OTHER; note = 2' Fluoro-uridine
  modified_base 10: mod_base = OTHER; note = 2' Fluoro-cytidine
  modified_base 11: mod_base = OTHER; note = 2' Fluoro-cytidine
  modified_base 12: mod_base = OTHER; note = 2' Fluoro-uridine
  modified_base 13: mod_base = cm
  modified_base 14: mod_base = OTHER; note = 2'O-methyl-adenosine
  modified_base 15: mod_base = um
  modified_base 16: mod_base = gm
  modified_base 17: mod_base = gm
  modified_base 18: mod_base = OTHER; note = 2'O-methyl-adenosine
  modified_base 19: mod_base = gm
  modified_base 20: mod_base = OTHER; note = 2'O-methyl-adenosine
  modified_base 21: mod_base = OTHER; note = 2'O-methyl-adenosine
  modified_base 1^2: mod_base = OTHER; note = phosphorothioate linkage
  modified_base 2^3: mod_base = OTHER; note = phosphorothioate linkage
gctggtggtcctcatggagaa

SEQ ID NO: 725 - RNA, 21 nt, synthetic construct
  source 1..21: mol_type = other RNA
  misc_feature 1..21: note = Description: ZPI siRNA sense strand: ETXS957; corresponding to SEQ ID NO: 245
  modified_base 1: mod_base = gm
  modified_base 2: mod_base = cm
  modified_base 3: mod_base = gm
  modified_base 4: mod_base = OTHER; note = 2'O-methyl-adenosine
  modified_base 5: mod_base = OTHER; note = 2'O-methyl-adenosine
  modified_base 6: mod_base = OTHER; note = 2'O-methyl-adenosine
  modified_base 7: mod_base = OTHER; note = 2' Fluoro-guanosine
  modified_base 8: mod_base = OTHER; note = 2'O-methyl-adenosine
  modified_base 9: mod_base = OTHER; note = 2' Fluoro-uridine
  modified_base 10: mod_base = OTHER; note = 2' Fluoro-cytidine
  modified_base 11: mod_base = OTHER; note = 2' Fluoro-uridine
  modified_base 12: mod_base = OTHER; note = 2' Fluoro-cytidine
  modified_base 13: mod_base = cm
  modified_base 14: mod_base = OTHER; note = 2'O-methyl-adenosine
  modified_base 15: mod_base = um
  modified_base 16: mod_base = gm
  modified_base 17: mod_base = OTHER; note = 2'O-methyl-adenosine
  modified_base 18: mod_base = gm
  modified_base 19: mod_base = gm
  modified_base 20: mod_base = cm
  modified_base 21: mod_base = OTHER; note = 2'O-methyl-adenosine
  modified_base 1^2: mod_base = OTHER; note = phosphorothioate linkage
  modified_base 2^3: mod_base = OTHER; note = phosphorothioate linkage
gcgaaagatctccatgaggca

SEQ ID NO: 726 - RNA, 21 nt, synthetic construct
  source 1..21: mol_type = other RNA
  misc_feature 1..21: note = Description: ZPI siRNA sense strand: ETXS959; corresponding to SEQ ID NO: 246
  modified_base 1: mod_base = gm
  modified_base 2: mod_base = um
  modified_base 3: mod_base = OTHER; note = 2'O-methyl-adenosine
  modified_base 4: mod_base = um
  modified_base 5: mod_base = gm
  modified_base 6: mod_base = OTHER; note = 2'O-methyl-adenosine
  modified_base 7: mod_base = OTHER; note = 2' Fluoro-guanosine
  modified_base 8: mod_base = OTHER; note = 2'O-methyl-adenosine
  modified_base 9: mod_base = OTHER; note = 2' Fluoro-uridine
  modified_base 10: mod_base = OTHER; note = 2' Fluoro-guanosine
  modified_base 11: mod_base = OTHER; note = 2' Fluoro-cytidine
  modified_base 12: mod_base = OTHER; note = 2'-Fluoro-adenosine
  modified_base 13: mod_base = um
  modified_base 14: mod_base = gm
  modified_base 15: mod_base = OTHER; note = 2'O-methyl-adenosine
  modified_base 16: mod_base = gm
  modified_base 17: mod_base = cm
  modified_base 18: mod_base = um
  modified_base 19: mod_base = gm
  modified_base 20: mod_base = cm
  modified_base 21: mod_base = um
  modified_base 1^2: mod_base = OTHER; note = phosphorothioate linkage
  modified_base 2^3: mod_base = OTHER; note = phosphorothioate linkage
gtatgagatgcatgagctgct

SEQ ID NO: 727 - RNA, 21 nt, synthetic construct
  source 1..21: mol_type = other RNA
  misc_feature 1..21: note = Description: ZPI siRNA sense strand: ETXS961; corresponding to SEQ ID NO: 247
  modified_base 1: mod_base = gm
  modified_base 2: mod_base = um
  modified_base 3: mod_base = um
  modified_base 4: mod_base = um
  modified_base 5: mod_base = gm
  modified_base 6: mod_base = OTHER; note = 2'O-methyl-adenosine
  modified_base 7: mod_base = OTHER; note = 2' Fluoro-uridine
  modified_base 8: mod_base = gm
  modified_base 9: mod_base = OTHER; note = 2'-Fluoro-adenosine
  modified_base 10: mod_base = OTHER; note = 2' Fluoro-guanosine
  modified_base 11: mod_base = OTHER; note = 2'-Fluoro-adenosine
  modified_base 12: mod_base = OTHER; note = 2' Fluoro-uridine
  modified_base 13: mod_base = um
  modified_base 14: mod_base = OTHER; note = 2'O-methyl-adenosine
  modified_base 15: mod_base = OTHER; note = 2'O-methyl-adenosine
  modified_base 16: mod_base = um
  modified_base 17: mod_base = cm
  modified_base 18: mod_base = cm
  modified_base 19: mod_base = um
  modified_base 20: mod_base = gm
  modified_base 21: mod_base = OTHER; note = 2'O-methyl-adenosine
  modified_base 1^2: mod_base = OTHER; note = phosphorothioate linkage
  modified_base 2^3: mod_base = OTHER; note = phosphorothioate linkage
gtttgatgagattaatcctga

SEQ ID NO: 728 - RNA, 21 nt, synthetic construct
  source 1..21: mol_type = other RNA
  misc_feature 1..21: note = Description: ZPI siRNA sense strand: ETXS963; corresponding to SEQ ID NO: 248
  modified_base 1: mod_base = um
  modified_base 2: mod_base = gm
  modified_base 3: mod_base = OTHER; note = 2'O-methyl-adenosine
  modified_base 4: mod_base = gm
  modified_base 5: mod_base = OTHER; note = 2'O-methyl-adenosine
  modified_base 6: mod_base = um
  modified_base 7: mod_base = OTHER; note = 2' Fluoro-uridine
  modified_base 8: mod_base = OTHER; note = 2'O-methyl-adenosine
  modified_base 9: mod_base = OTHER; note = 2'-Fluoro-adenosine
  modified_base 10: mod_base = OTHER; note = 2' Fluoro-uridine
  modified_base 11: mod_base = OTHER; note = 2' Fluoro-cytidine
  modified_base 12: mod_base = OTHER; note = 2' Fluoro-cytidine
  modified_base 13: mod_base = um
  modified_base 14: mod_base = gm
  modified_base 15: mod_base = OTHER; note = 2'O-methyl-adenosine
  modified_base 16: mod_base = OTHER; note = 2'O-methyl-adenosine
  modified_base 17: mod_base = OTHER; note = 2'O-methyl-adenosine
  modified_base 18: mod_base = cm
  modified_base 19: mod_base = cm
  modified_base 20: mod_base = OTHER; note = 2'O-methyl-adenosine
  modified_base 21: mod_base = OTHER; note = 2'O-methyl-adenosine
  modified_base 1^2: mod_base = OTHER; note = phosphorothioate linkage
  modified_base 2^3: mod_base = OTHER; note = phosphorothioate linkage
tgagattaatcctgaaaccaa

SEQ ID NO: 729 - RNA, 21 nt, synthetic construct
  source 1..21: mol_type = other RNA
  misc_feature 1..21: note = Description: ZPI siRNA sense strand: ETXS965; corresponding to SEQ ID NO: 249
  modified_base 1: mod_base = um
  modified_base 2: mod_base = gm
  modified_base 3: mod_base = OTHER; note = 2'O-methyl-adenosine
  modified_base 4: mod_base = um
  modified_base 5: mod_base = gm
  modified_base 6: mod_base = OTHER; note = 2'O-methyl-adenosine
  modified_base 7: mod_base = OTHER; note = 2' Fluoro-guanosine
  modified_base 8: mod_base = OTHER; note = 2'O-methyl-adenosine
  modified_base 9: mod_base = OTHER; note = 2' Fluoro-uridine
  modified_base 10: mod_base = OTHER; note = 2' Fluoro-uridine
  modified_base 11: mod_base = OTHER; note = 2'-Fluoro-adenosine
  modified_base 12: mod_base = OTHER; note = 2'-Fluoro-adenosine
  modified_base 13: mod_base = um
  modified_base 14: mod_base = cm
  modified_base 15: mod_base = cm
  modified_base 16: mod_base = um
  modified_base 17: mod_base = gm
  modified_base 18: mod_base = OTHER; note = 2'O-methyl-adenosine
  modified_base 19: mod_base = OTHER; note = 2'O-methyl-adenosine
  modified_base 20: mod_base = OTHER; note = 2'O-methyl-adenosine
  modified_base 21: mod_base = cm
  modified_base 1^2: mod_base = OTHER; note = phosphorothioate linkage
  modified_base 2^3: mod_base = OTHER; note = phosphorothioate linkage
tgatgagattaatcctgaaac

SEQ ID NO: 730 - RNA, 21 nt, synthetic construct
  source 1..21: mol_type = other RNA
  misc_feature 1..21: note = Description: ZPI siRNA sense strand: ETXS967; corresponding to SEQ ID NO: 250
  modified_base 1: mod_base = OTHER; note = 2'O-methyl-adenosine
  modified_base 2: mod_base = um
  modified_base 3: mod_base = gm
  modified_base 4: mod_base = OTHER; note = 2'O-methyl-adenosine
  modified_base 5: mod_base = gm
  modified_base 6: mod_base = OTHER; note = 2'O-methyl-adenosine
  modified_base 7: mod_base = OTHER; note = 2' Fluoro-uridine
  modified_base 8: mod_base = um
  modified_base 9: mod_base = OTHER; note = 2'-Fluoro-adenosine
  modified_base 10: mod_base = OTHER; note = 2'-Fluoro-adenosine
  modified_base 11: mod_base = OTHER; note = 2' Fluoro-uridine
  modified_base 12: mod_base = OTHER; note = 2' Fluoro-cytidine
  modified_base 13: mod_base = cm
  modified_base 14: mod_base = um
  modified_base 15: mod_base = gm
  modified_base 16: mod_base = OTHER; note = 2'O-methyl-adenosine
  modified_base 17: mod_base = OTHER; note = 2'O-methyl-adenosine
  modified_base 18: mod_base = OTHER; note = 2'O-methyl-adenosine
  modified_base 19: mod_base = cm
  modified_base 20: mod_base = cm
  modified_base 21: mod_base = OTHER; note = 2'O-methyl-adenosine
  modified_base 1^2: mod_base = OTHER; note = phosphorothioate linkage
  modified_base 2^3: mod_base = OTHER; note = phosphorothioate linkage
atgagattaatcctgaaacca

SEQ ID NO: 731 - RNA, 21 nt, synthetic construct
  source 1..21: mol_type = other RNA
  misc_feature 1..21: note = Description: ZPI siRNA sense strand: ETXS969; corresponding to SEQ ID NO: 251
  modified_base 1: mod_base = gm
  modified_base 2: mod_base = OTHER; note = 2'O-methyl-adenosine
  modified_base 3: mod_base = um
  modified_base 4: mod_base = gm
  modified_base 5: mod_base = OTHER; note = 2'O-methyl-adenosine
  modified_base 6: mod_base = gm
  modified_base 7: mod_base = OTHER; note = 2'-Fluoro-adenosine
  modified_base 8: mod_base = um
  modified_base 9: mod_base = OTHER; note = 2' Fluoro-uridine
  modified_base 10: mod_base = OTHER; note = 2'-Fluoro-adenosine
  modified_base 11: mod_base = OTHER; note = 2'-Fluoro-adenosine
  modified_base 12: mod_base = OTHER; note = 2' Fluoro-uridine
  modified_base 13: mod_base = cm
  modified_base 14: mod_base = cm
  modified_base 15: mod_base = um
  modified_base 16: mod_base = gm
  modified_base 17: mod_base = OTHER; note = 2'O-methyl-adenosine
  modified_base 18: mod_base = OTHER; note = 2'O-methyl-adenosine
  modified_base 19: mod_base = OTHER; note = 2'O-methyl-adenosine
  modified_base 20: mod_base = cm
  modified_base 21: mod_base = cm
  modified_base 1^2: mod_base = OTHER; note = phosphorothioate linkage
  modified_base 2^3: mod_base = OTHER; note = phosphorothioate linkage
gatgagattaatcctgaaacc

SEQ ID NO: 732 - RNA, 21 nt, synthetic construct
  source 1..21: mol_type = other RNA
  misc_feature 1..21: note = Description: ZPI siRNA sense strand: ETXS971; corresponding to SEQ ID NO: 252
  modified_base 1: mod_base = cm
  modified_base 2: mod_base = um
  modified_base 3: mod_base = gm
  modified_base 4: mod_base = um
  modified_base 5: mod_base = um
  modified_base 6: mod_base = um
  modified_base 7: mod_base = OTHER; note = 2' Fluoro-guanosine
  modified_base 8: mod_base = OTHER; note = 2'O-methyl-adenosine
  modified_base 9: mod_base = OTHER; note = 2' Fluoro-uridine
  modified_base 10: mod_base = OTHER; note = 2' Fluoro-guanosine
  modified_base 11: mod_base = OTHER; note = 2'-Fluoro-adenosine
  modified_base 12: mod_base = OTHER; note = 2' Fluoro-guanosine
  modified_base 13: mod_base = OTHER; note = 2'O-methyl-adenosine
  modified_base 14: mod_base = um
  modified_base 15: mod_base = um
  modified_base 16: mod_base = OTHER; note = 2'O-methyl-adenosine
  modified_base 17: mod_base = OTHER; note = 2'O-methyl-adenosine
  modified_base 18: mod_base = um
  modified_base 19: mod_base = cm
  modified_base 20: mod_base = cm
  modified_base 21: mod_base = um
  modified_base 1^2: mod_base = OTHER; note = phosphorothioate linkage
  modified_base 2^3: mod_base = OTHER; note = phosphorothioate linkage
ctgtttgatgagattaatcct

SEQ ID NO: 733 - RNA, 21 nt, synthetic construct
  source 1..21: mol_type = other RNA
  misc_feature 1..21: note = Description: ZPI siRNA sense strand: ETXS973; corresponding to SEQ ID NO: 253
  modified_base 1: mod_base = um
  modified_base 2: mod_base = um
  modified_base 3: mod_base = um
  modified_base 4: mod_base = um
  modified_base 5: mod_base = gm
  modified_base 6: mod_base = cm
  modified_base 7: mod_base = OTHER; note = 2' Fluoro-cytidine
  modified_base 8: mod_base = um
  modified_base 9: mod_base = OTHER; note = 2' Fluoro-uridine
  modified_base 10: mod_base = OTHER; note = 2' Fluoro-cytidine
  modified_base 11: mod_base = OTHER; note = 2'-Fluoro-adenosine
  modified_base 12: mod_base = OTHER; note = 2' Fluoro-uridine
  modified_base 13: mod_base = cm
  modified_base 14: mod_base = cm
  modified_base 15: mod_base = OTHER; note = 2'O-methyl-adenosine
  modified_base 16: mod_base = cm
  modified_base 17: mod_base = OTHER; note = 2'O-methyl-adenosine
  modified_base 18: mod_base = OTHER; note = 2'O-methyl-adenosine
  modified_base 19: mod_base = gm
  modified_base 20: mod_base = gm
  modified_base 21: mod_base = OTHER; note = 2'O-methyl-adenosine
  modified_base 1^2: mod_base = OTHER; note = phosphorothioate linkage
  modified_base 2^3: mod_base = OTHER; note = phosphorothioate linkage
ttttgccttcatccacaagga

SEQ ID NO: 734 - RNA, 21 nt, synthetic construct
  source 1..21: mol_type = other RNA
  misc_feature 1..21: note = Description: ZPI siRNA sense strand: ETXS975; corresponding to SEQ ID NO: 254
  modified_base 1: mod_base = cm
  modified_base 2: mod_base = gm
  modified_base 3: mod_base = OTHER; note = 2'O-methyl-adenosine
  modified_base 4: mod_base = OTHER; note = 2'O-methyl-adenosine
  modified_base 5: mod_base = OTHER; note = 2'O-methyl-adenosine
  modified_base 6: mod_base = gm
  modified_base 7: mod_base = OTHER; note = 2'-Fluoro-adenosine
  modified_base 8: mod_base = um
  modified_base 9: mod_base = OTHER; note = 2' Fluoro-cytidine
  modified_base 10: mod_base = OTHER; note = 2' Fluoro-uridine
  modified_base 11: mod_base = OTHER; note = 2' Fluoro-cytidine
  modified_base 12: mod_base = OTHER; note = 2' Fluoro-cytidine
  modified_base 13: mod_base = OTHER; note = 2'O-methyl-adenosine
  modified_base 14: mod_base = um
  modified_base 15: mod_base = gm
  modified_base 16: mod_base = OTHER; note = 2'O-methyl-adenosine
  modified_base 17: mod_base = gm
  modified_base 18: mod_base = gm
  modified_base 19: mod_base = cm
  modified_base 20: mod_base = OTHER; note = 2'O-methyl-adenosine
  modified_base 21: mod_base = cm
  modified_base 1^2: mod_base = OTHER; note = phosphorothioate linkage
  modified_base 2^3: mod_base = OTHER; note = phosphorothioate linkage
cgaaagatctccatgaggcac

SEQ ID NO: 735 - RNA, 21 nt, synthetic construct
  source 1..21: mol_type = other RNA
  misc_feature 1..21: note = Description: ZPI siRNA sense strand: ETXS977; corresponding to SEQ ID NO: 255
  modified_base 1: mod_base = um
  modified_base 2: mod_base = gm
  modified_base 3: mod_base = cm
  modified_base 4: mod_base = um
  modified_base 5: mod_base = gm
  modified_base 6: mod_base = gm
  modified_base 7: mod_base = OTHER; note = 2' Fluoro-uridine
  modified_base 8: mod_base = gm
  modified_base 9: mod_base = OTHER; note = 2' Fluoro-guanosine
  modified_base 10: mod_base = OTHER; note = 2' Fluoro-uridine
  modified_base 11: mod_base = OTHER; note = 2' Fluoro-cytidine
  modified_base 12: mod_base = OTHER; note = 2' Fluoro-cytidine
  modified_base 13: mod_base = um
  modified_base 14: mod_base = cm
  modified_base 15: mod_base = OTHER; note = 2'O-methyl-adenosine
  modified_base 16: mod_base = um
  modified_base 17: mod_base = gm
  modified_base 18: mod_base = gm
  modified_base 19: mod_base = OTHER; note = 2'O-methyl-adenosine
  modified_base 20: mod_base = gm
  modified_base 21: mod_base = OTHER; note = 2'O-methyl-adenosine
  modified_base 1^2: mod_base = OTHER; note = phosphorothioate linkage
  modified_base 2^3: mod_base = OTHER; note = phosphorothioate linkage
tgctggtggtcctcatggaga

SEQ ID NO: 736 - RNA, 21 nt, synthetic construct
  source 1..21: mol_type = other RNA
  misc_feature 1..21: note = Description: ZPI siRNA sense strand: ETXS979; corresponding to SEQ ID NO: 256
  modified_base 1: mod_base = cm
  modified_base 2: mod_base = cm
  modified_base 3: mod_base = um
  modified_base 4: mod_base = um
  modified_base 5: mod_base = cm
  modified_base 6: mod_base = OTHER; note = 2'O-methyl-adenosine
  modified_base 7: mod_base = OTHER; note = 2' Fluoro-uridine
  modified_base 8: mod_base = cm
  modified_base 9: mod_base = OTHER; note = 2' Fluoro-cytidine
  modified_base 10: mod_base = OTHER; note = 2'-Fluoro-adenosine
  modified_base 11: mod_base = OTHER; note = 2' Fluoro-cytidine
  modified_base 12: mod_base = OTHER; note = 2'-Fluoro-adenosine
  modified_base 13: mod_base = OTHER; note = 2'O-methyl-adenosine
  modified_base 14: mod_base = gm
  modified_base 15: mod_base = gm
  modified_base 16: mod_base = OTHER; note = 2'O-methyl-adenosine
  modified_base 17: mod_base = um
  modified_base 18: mod_base = um
  modified_base 19: mod_base = um
  modified_base 20: mod_base = um
  modified_base 21: mod_base = gm
  modified_base 1^2: mod_base = OTHER; note = phosphorothioate linkage
  modified_base 2^3: mod_base = OTHER; note = phosphorothioate linkage
ccttcatccacaaggattttg

SEQ ID NO: 737 - RNA, 21 nt, synthetic construct
  source 1..21: mol_type = other RNA
  misc_feature 1..21: note = Description: ZPI siRNA sense strand: ETXS981; corresponding to SEQ ID NO: 257
  modified_base 1: mod_base = gm
  modified_base 2: mod_base = OTHER; note = 2'O-methyl-adenosine
  modified_base 3: mod_base = OTHER; note = 2'O-methyl-adenosine
  modified_base 4: mod_base = OTHER; note = 2'O-methyl-adenosine
  modified_base 5: mod_base = gm
  modified_base 6: mod_base = OTHER; note = 2'O-methyl-adenosine
  modified_base 7: mod_base = OTHER; note = 2' Fluoro-uridine
  modified_base 8: mod_base = cm
  modified_base 9: mod_base = OTHER; note = 2' Fluoro-uridine
  modified_base 10: mod_base = OTHER; note = 2' Fluoro-cytidine
  modified_base 11: mod_base = OTHER; note = 2' Fluoro-cytidine
  modified_base 12: mod_base = OTHER; note = 2'-Fluoro-adenosine
  modified_base 13: mod_base = um
  modified_base 14: mod_base = gm
  modified_base 15: mod_base = OTHER; note = 2'O-methyl-adenosine
  modified_base 16: mod_base = gm
  modified_base 17: mod_base = gm
  modified_base 18: mod_base = cm
  modified_base 19: mod_base = OTHER; note = 2'O-methyl-adenosine
  modified_base 20: mod_base = cm
  modified_base 21: mod_base = gm
  modified_base 1^2: mod_base = OTHER; note = phosphorothioate linkage
  modified_base 2^3: mod_base = OTHER; note = phosphorothioate linkage
gaaagatctccatgaggcacg

SEQ ID NO: 738 - RNA, 21 nt, synthetic construct
  source 1..21: mol_type = other RNA
  misc_feature 1..21: note = Description: ZPI siRNA sense strand: ETXS983; corresponding to SEQ ID NO: 258
  modified_base 1: mod_base = um
  modified_base 2: mod_base = um
  modified_base 3: mod_base = cm
  modified_base 4: mod_base = OTHER; note = 2'O-methyl-adenosine
  modified_base 5: mod_base = um
  modified_base 6: mod_base = cm
  modified_base 7: mod_base = OTHER; note = 2' Fluoro-cytidine
  modified_base 8: mod_base = OTHER; note = 2'O-methyl-adenosine
  modified_base 9: mod_base = OTHER; note = 2' Fluoro-cytidine
  modified_base 10: mod_base = OTHER; note = 2'-Fluoro-adenosine
  modified_base 11: mod_base = OTHER; note = 2'-Fluoro-adenosine
  modified_base 12: mod_base = OTHER; note = 2' Fluoro-guanosine
  modified_base 13: mod_base = gm
  modified_base 14: mod_base = OTHER; note = 2'O-methyl-adenosine
  modified_base 15: mod_base = um
  modified_base 16: mod_base = um
  modified_base 17: mod_base = um
  modified_base 18: mod_base = um
  modified_base 19: mod_base = gm
  modified_base 20: mod_base = OTHER; note = 2'O-methyl-adenosine
  modified_base 21: mod_base = um
  modified_base 1^2: mod_base = OTHER; note = phosphorothioate linkage
  modified_base 2^3: mod_base = OTHER; note = phosphorothioate linkage
ttcatccacaaggattttgat

SEQ ID NO: 739 - RNA, 21 nt, synthetic construct
  source 1..21: mol_type = other RNA
  misc_feature 1..21: note = Description: ZPI siRNA sense strand: ETXS985; corresponding to SEQ ID NO: 259
  modified_base 1: mod_base = um
  modified_base 2: mod_base = um
  modified_base 3: mod_base = um
  modified_base 4: mod_base = gm
  modified_base 5: mod_base = OTHER; note = 2'O-methyl-adenosine
  modified_base 6: mod_base = um
  modified_base 7: mod_base = OTHER; note = 2' Fluoro-guanosine
  modified_base 8: mod_base = OTHER; note = 2'O-methyl-adenosine
  modified_base 9: mod_base = OTHER; note = 2' Fluoro-guanosine
  modified_base 10: mod_base = OTHER; note = 2'-Fluoro-adenosine
  modified_base 11: mod_base = OTHER; note = 2' Fluoro-uridine
  modified_base 12: mod_base = OTHER; note = 2' Fluoro-uridine
  modified_base 13: mod_base = OTHER; note = 2'O-methyl-adenosine
  modified_base 14: mod_base = OTHER; note = 2'O-methyl-adenosine
  modified_base 15: mod_base = um
  modified_base 16: mod_base = cm
  modified_base 17: mod_base = cm
  modified_base 18: mod_base = um
  modified_base 19: mod_base = gm
  modified_base 20: mod_base = OTHER; note = 2'O-methyl-adenosine
  modified_base 21: mod_base = OTHER; note = 2'O-methyl-adenosine
  modified_base 1^2: mod_base = OTHER; note = phosphorothioate linkage
  modified_base 2^3: mod_base = OTHER; note = phosphorothioate linkage
tttgatgagattaatcctgaa

SEQ ID NO: 740 - RNA, 21 nt, synthetic construct
  source 1..21: mol_type = other RNA
  misc_feature 1..21: note = Description: ZPI siRNA sense strand: ETXS987; corresponding to SEQ ID NO: 260
  modified_base 1: mod_base = um
  modified_base 2: mod_base = um
  modified_base 3: mod_base = gm
  modified_base 4: mod_base = cm
  modified_base 5: mod_base = cm
  modified_base 6: mod_base = um
  modified_base 7: mod_base = OTHER; note = 2' Fluoro-uridine
  modified_base 8: mod_base = cm
  modified_base 9: mod_base = OTHER; note = 2'-Fluoro-adenosine
  modified_base 10: mod_base = OTHER; note = 2' Fluoro-uridine
  modified_base 11: mod_base = OTHER; note = 2' Fluoro-cytidine
  modified_base 12: mod_base = OTHER; note = 2' Fluoro-cytidine
  modified_base 13: mod_base = OTHER; note = 2'O-methyl-adenosine
  modified_base 14: mod_base = cm
  modified_base 15: mod_base = OTHER; note = 2'O-methyl-adenosine
  modified_base 16: mod_base = OTHER; note = 2'O-methyl-adenosine
  modified_base 17: mod_base = gm
  modified_base 18: mod_base = gm
  modified_base 19: mod_base = OTHER; note = 2'O-methyl-adenosine
  modified_base 20: mod_base = um
  modified_base 21: mod_base = um
  modified_base 1^2: mod_base = OTHER; note = phosphorothioate linkage
  modified_base 2^3: mod_base = OTHER; note = phosphorothioate linkage
ttgccttcatccacaaggatt

SEQ ID NO: 741 - RNA, 21 nt, synthetic construct
  source 1..21: mol_type = other RNA
  misc_feature 1..21: note = Description: ZPI siRNA sense strand: ETXS989; corresponding to SEQ ID NO: 261
  modified_base 1: mod_base = gm
  modified_base 2: mod_base = OTHER; note = 2'O-methyl-adenosine
  modified_base 3: mod_base = um
  modified_base 4: mod_base = cm
  modified_base 5: mod_base = um
  modified_base 6: mod_base = cm
  modified_base 7: mod_base = OTHER; note = 2' Fluoro-cytidine
  modified_base 8: mod_base = OTHER; note = 2'O-methyl-adenosine
  modified_base 9: mod_base = OTHER; note = 2' Fluoro-uridine
  modified_base 10: mod_base = OTHER; note = 2' Fluoro-guanosine
  modified_base 11: mod_base = OTHER; note = 2'-Fluoro-adenosine
  modified_base 12: mod_base = OTHER; note = 2' Fluoro-guanosine
  modified_base 13: mod_base = gm
  modified_base 14: mod_base = cm
  modified_base 15: mod_base = OTHER; note = 2'O-methyl-adenosine
  modified_base 16: mod_base = cm
  modified_base 17: mod_base = gm
  modified_base 18: mod_base = OTHER; note = 2'O-methyl-adenosine
  modified_base 19: mod_base = um
  modified_base 20: mod_base = gm
  modified_base 21: mod_base = gm
  modified_base 1^2: mod_base = OTHER; note = phosphorothioate linkage
  modified_base 2^3: mod_base = OTHER; note = phosphorothioate linkage
gatctccatgaggcacgatgg

SEQ ID NO: 742 - RNA, 21 nt, synthetic construct
  source 1..21: mol_type = other RNA
  misc_feature 1..21: note = Description: ZPI siRNA sense strand: ETXS991; corresponding to SEQ ID NO: 242
  modified_base 1: mod_base = um
  modified_base 2: mod_base = gm
  modified_base 3: mod_base = cm
  modified_base 4: mod_base = cm
  modified_base 5: mod_base = um
  modified_base 6: mod_base = um
  modified_base 7: mod_base = OTHER; note = 2' Fluoro-cytidine
  modified_base 8: mod_base = OTHER; note = 2'O-methyl-adenosine
  modified_base 9: mod_base = OTHER; note = 2' Fluoro-uridine
  modified_base 10: mod_base = OTHER; note = 2' Fluoro-cytidine
  modified_base 11: mod_base = OTHER; note = 2' Fluoro-cytidine
  modified_base 12: mod_base = OTHER; note = 2'-Fluoro-adenosine
  modified_base 13: mod_base = cm
  modified_base 14: mod_base = OTHER; note = 2'O-methyl-adenosine
  modified_base 15: mod_base = OTHER; note = 2'O-methyl-adenosine
  modified_base 16: mod_base = gm
  modified_base 17: mod_base = gm
  modified_base 18: mod_base = OTHER; note = 2'O-methyl-adenosine
  modified_base 19: mod_base = um
  modified_base 20: mod_base = um
  modified_base 21: mod_base = um
  modified_base 1^2: mod_base = OTHER; note = phosphorothioate linkage
  modified_base 2^3: mod_base = OTHER; note = phosphorothioate linkage
tgccttcatccacaaggattt

SEQ ID NO: 743 - RNA, 21 nt, synthetic construct
  source 1..21: mol_type = other RNA
  misc_feature 1..21: note = Description: ZPI siRNA sense strand: ETXS993; corresponding to SEQ ID NO: 243
  modified_base 1: mod_base = um
  modified_base 2: mod_base = gm
  modified_base 3: mod_base = cm
  modified_base 4: mod_base = gm
  modified_base 5: mod_base = OTHER; note = 2'O-methyl-adenosine
  modified_base 6: mod_base = OTHER; note = 2'O-methyl-adenosine
  modified_base 7: mod_base = OTHER; note = 2'-Fluoro-adenosine
  modified_base 8: mod_base = gm
  modified_base 9: mod_base = OTHER; note = 2'-Fluoro-adenosine
  modified_base 10: mod_base = OTHER; note = 2' Fluoro-uridine
  modified_base 11: mod_base = OTHER; note = 2' Fluoro-cytidine
  modified_base 12: mod_base = OTHER; note = 2' Fluoro-uridine
  modified_base 13: mod_base = cm
  modified_base 14: mod_base = cm
  modified_base 15: mod_base = OTHER; note = 2'O-methyl-adenosine
  modified_base 16: mod_base = um
  modified_base 17: mod_base = gm
  modified_base 18: mod_base = OTHER; note = 2'O-methyl-adenosine
  modified_base 19: mod_base = gm
  modified_base 20: mod_base = gm
  modified_base 21: mod_base = cm
  modified_base 1^2: mod_base = OTHER; note = phosphorothioate linkage
  modified_base 2^3: mod_base = OTHER; note = phosphorothioate linkage
tgcgaaagatctccatgaggc

SEQ ID NO: 744 - RNA, 21 nt, synthetic construct
  source 1..21: mol_type = other RNA
  misc_feature 1..21: note = Description: ZPI siRNA sense strand: ETXS995; corresponding to SEQ ID NO: 244
  modified_base 1: mod_base = gm
  modified_base 2: mod_base = cm
  modified_base 3: mod_base = um
  modified_base 4: mod_base = gm
  modified_base 5: mod_base = gm
  modified_base 6: mod_base = um
  modified_base 7: mod_base = OTHER; note = 2' Fluoro-guanosine
  modified_base 8: mod_base = gm
  modified_base 9: mod_base = OTHER; note = 2' Fluoro-uridine
  modified_base 10: mod_base = OTHER; note = 2' Fluoro-cytidine
  modified_base 11: mod_base = OTHER; note = 2' Fluoro-cytidine
  modified_base 12: mod_base = OTHER; note = 2' Fluoro-uridine
  modified_base 13: mod_base = cm
  modified_base 14: mod_base = OTHER; note = 2'O-methyl-adenosine
  modified_base 15: mod_base = um
  modified_base 16: mod_base = gm
  modified_base 17: mod_base = gm
  modified_base 18: mod_base = OTHER; note = 2'O-methyl-adenosine
  modified_base 19: mod_base = gm
  modified_base 20: mod_base = OTHER; note = 2'O-methyl-adenosine
  modified_base 21: mod_base = OTHER; note = 2'O-methyl-adenosine
  modified_base 1^2: mod_base = OTHER; note = phosphorothioate linkage
  modified_base 2^3: mod_base = OTHER; note = phosphorothioate linkage
gctggtggtcctcatggagaa

SEQ ID NO: 745 - RNA, 21 nt, synthetic construct
  source 1..21: mol_type = other RNA
  misc_feature 1..21: note = Description: ZPI siRNA sense strand: ETXS997; corresponding to SEQ ID NO: 245
  modified_base 1: mod_base = gm
  modified_base 2: mod_base = cm
  modified_base 3: mod_base = gm
  modified_base 4: mod_base = OTHER; note = 2'O-methyl-adenosine
  modified_base 5: mod_base = OTHER; note = 2'O-methyl-adenosine
  modified_base 6: mod_base = OTHER; note = 2'O-methyl-adenosine
  modified_base 7: mod_base = OTHER; note = 2' Fluoro-guanosine
  modified_base 8: mod_base = OTHER; note = 2'O-methyl-adenosine
  modified_base 9: mod_base = OTHER; note = 2' Fluoro-uridine
  modified_base 10: mod_base = OTHER; note = 2' Fluoro-cytidine
  modified_base 11: mod_base = OTHER; note = 2' Fluoro-uridine
  modified_base 12: mod_base = OTHER; note = 2' Fluoro-cytidine
  modified_base 13: mod_base = cm
  modified_base 14: mod_base = OTHER; note = 2'O-methyl-adenosine
  modified_base 15: mod_base = um
  modified_base 16: mod_base = gm
  modified_base 17: mod_base = OTHER; note = 2'O-methyl-adenosine
  modified_base 18: mod_base = gm
  modified_base 19: mod_base = gm
  modified_base 20: mod_base = cm
  modified_base 21: mod_base = OTHER; note = 2'O-methyl-adenosine
  modified_base 1^2: mod_base = OTHER; note = phosphorothioate linkage
  modified_base 2^3: mod_base = OTHER; note = phosphorothioate linkage
gcgaaagatctccatgaggca

SEQ ID NO: 746 - RNA, 21 nt, synthetic construct
  source 1..21: mol_type = other RNA
  misc_feature 1..21: note = Description: ZPI siRNA sense strand: ETXS999; corresponding to SEQ ID NO: 246
  modified_base 1: mod_base = gm
  modified_base 2: mod_base = um
  modified_base 3: mod_base = OTHER; note = 2'O-methyl-adenosine
  modified_base 4: mod_base = um
  modified_base 5: mod_base = gm
  modified_base 6: mod_base = OTHER; note = 2'O-methyl-adenosine
  modified_base 7: mod_base = OTHER; note = 2' Fluoro-guanosine
  modified_base 8: mod_base = OTHER; note = 2'O-methyl-adenosine
  modified_base 9: mod_base = OTHER; note = 2' Fluoro-uridine
  modified_base 10: mod_base = OTHER; note = 2' Fluoro-guanosine
  modified_base 11: mod_base = OTHER; note = 2' Fluoro-cytidine
  modified_base 12: mod_base = OTHER; note = 2'-Fluoro-adenosine
  modified_base 13: mod_base = um
  modified_base 14: mod_base = gm
  modified_base 15: mod_base = OTHER; note = 2'O-methyl-adenosine
  modified_base 16: mod_base = gm
  modified_base 17: mod_base = cm
  modified_base 18: mod_base = um
  modified_base 19: mod_base = gm
  modified_base 20: mod_base = cm
  modified_base 21: mod_base = um
  modified_base 1^2: mod_base = OTHER; note = phosphorothioate linkage
  modified_base 2^3: mod_base = OTHER; note = phosphorothioate linkage
gtatgagatgcatgagctgct

SEQ ID NO: 747 - RNA, 21 nt, synthetic construct
  source 1..21: mol_type = other RNA
  misc_feature 1..21: note = Description: ZPI siRNA sense strand: ETXS1001; corresponding to SEQ ID NO: 247
  modified_base 1: mod_base = gm
  modified_base 2: mod_base = um
  modified_base 3: mod_base = um
  modified_base 4: mod_base = um
  modified_base 5: mod_base = gm
  modified_base 6: mod_base = OTHER; note = 2'O-methyl-adenosine
  modified_base 7: mod_base = OTHER; note = 2' Fluoro-uridine
  modified_base 8: mod_base = gm
  modified_base 9: mod_base = OTHER; note = 2'-Fluoro-adenosine
  modified_base 10: mod_base = OTHER; note = 2' Fluoro-guanosine
  modified_base 11: mod_base = OTHER; note = 2'-Fluoro-adenosine
  modified_base 12: mod_base = OTHER; note = 2' Fluoro-uridine
  modified_base 13: mod_base = um
  modified_base 14: mod_base = OTHER; note = 2'O-methyl-adenosine
  modified_base 15: mod_base = OTHER; note = 2'O-methyl-adenosine
  modified_base 16: mod_base = um
  modified_base 17: mod_base = cm
  modified_base 18: mod_base = cm
  modified_base 19: mod_base = um
  modified_base 20: mod_base = gm
  modified_base 21: mod_base = OTHER; note = 2'O-methyl-adenosine
  modified_base 1^2: mod_base = OTHER; note = phosphorothioate linkage
  modified_base 2^3: mod_base = OTHER; note = phosphorothioate linkage
gtttgatgagattaatcctga

SEQ ID NO: 748 - RNA, 21 nt, synthetic construct
  source 1..21: mol_type = other RNA
  misc_feature 1..21: note = Description: ZPI siRNA sense strand: ETXS1003; corresponding to SEQ ID NO: 248
  modified_base 1: mod_base = um
  modified_base 2: mod_base = gm
  modified_base 3: mod_base = OTHER; note = 2'O-methyl-adenosine
  modified_base 4: mod_base = gm
  modified_base 5: mod_base = OTHER; note = 2'O-methyl-adenosine
  modified_base 6: mod_base = um
  modified_base 7: mod_base = OTHER; note = 2' Fluoro-uridine
  modified_base 8: mod_base = OTHER; note = 2'O-methyl-adenosine
  modified_base 9: mod_base = OTHER; note = 2'-Fluoro-adenosine
  modified_base 10: mod_base = OTHER; note = 2' Fluoro-uridine
  modified_base 11: mod_base = OTHER; note = 2' Fluoro-cytidine
  modified_base 12: mod_base = OTHER; note = 2' Fluoro-cytidine
  modified_base 13: mod_base = um
  modified_base 14: mod_base = gm
  modified_base 15: mod_base = OTHER; note = 2'O-methyl-adenosine
  modified_base 16: mod_base = OTHER; note = 2'O-methyl-adenosine
  modified_base 17: mod_base = OTHER; note = 2'O-methyl-adenosine
  modified_base 18: mod_base = cm
  modified_base 19: mod_base = cm
  modified_base 20: mod_base = OTHER; note = 2'O-methyl-adenosine
  modified_base 21: mod_base = OTHER; note = 2'O-methyl-adenosine
  modified_base 1^2: mod_base = OTHER; note = phosphorothioate linkage
  modified_base 2^3: mod_base = OTHER; note = phosphorothioate linkage
tgagattaatcctgaaaccaa

SEQ ID NO: 749 - RNA, 21 nt, synthetic construct
  source 1..21: mol_type = other RNA
  misc_feature 1..21: note = Description: ZPI siRNA sense strand: ETXS1005; corresponding to SEQ ID NO: 249
  modified_base 1: mod_base = um
  modified_base 2: mod_base = gm
  modified_base 3: mod_base = OTHER; note = 2'O-methyl-adenosine
  modified_base 4: mod_base = um
  modified_base 5: mod_base = gm
  modified_base 6: mod_base = OTHER; note = 2'O-methyl-adenosine
  modified_base 7: mod_base = OTHER; note = 2' Fluoro-guanosine
  modified_base 8: mod_base = OTHER; note = 2'O-methyl-adenosine
  modified_base 9: mod_base = OTHER; note = 2' Fluoro-uridine
  modified_base 10: mod_base = OTHER; note = 2' Fluoro-uridine
  modified_base 11: mod_base = OTHER; note = 2'-Fluoro-adenosine
  modified_base 12: mod_base = OTHER; note = 2'-Fluoro-adenosine
  modified_base 13: mod_base = um
  modified_base 14: mod_base = cm
  modified_base 15: mod_base = cm
  modified_base 16: mod_base = um
  modified_base 17: mod_base = gm
  modified_base 18: mod_base = OTHER; note = 2'O-methyl-adenosine
  modified_base 19: mod_base = OTHER; note = 2'O-methyl-adenosine
  modified_base 20: mod_base = OTHER; note = 2'O-methyl-adenosine
  modified_base 21: mod_base = cm
  modified_base 1^2: mod_base = OTHER; note = phosphorothioate linkage
  modified_base 2^3: mod_base = OTHER; note = phosphorothioate linkage
tgatgagattaatcctgaaac

SEQ ID NO: 750 - RNA, 21 nt, synthetic construct
  source 1..21: mol_type = other RNA
  misc_feature 1..21: note = Description: ZPI siRNA sense strand: ETXS1007; corresponding to SEQ ID NO: 250
  modified_base 1: mod_base = OTHER; note = 2'O-methyl-adenosine
  modified_base 2: mod_base = um
  modified_base 3: mod_base = gm
  modified_base 4: mod_base = OTHER; note = 2'O-methyl-adenosine
  modified_base 5: mod_base = gm
  modified_base 6: mod_base = OTHER; note = 2'O-methyl-adenosine
  modified_base 7: mod_base = OTHER; note = 2' Fluoro-uridine
  modified_base 8: mod_base = um
  modified_base 9: mod_base = OTHER; note = 2'-Fluoro-adenosine
  modified_base 10: mod_base = OTHER; note = 2'-Fluoro-adenosine
  modified_base 11: mod_base = OTHER; note = 2' Fluoro-uridine
  modified_base 12: mod_base = OTHER; note = 2' Fluoro-cytidine
  modified_base 13: mod_base = cm
  modified_base 14: mod_base = um
  modified_base 15: mod_base = gm
  modified_base 16: mod_base = OTHER; note = 2'O-methyl-adenosine
  modified_base 17: mod_base = OTHER; note = 2'O-methyl-adenosine
  modified_base 18: mod_base = OTHER; note = 2'O-methyl-adenosine
  modified_base 19: mod_base = cm
  modified_base 20: mod_base = cm
  modified_base 21: mod_base = OTHER; note = 2'O-methyl-adenosine
  modified_base 1^2: mod_base = OTHER; note = phosphorothioate linkage
  modified_base 2^3: mod_base = OTHER; note = phosphorothioate linkage
atgagattaatcctgaaacca

SEQ ID NO: 751 - RNA, 21 nt, synthetic construct
  source 1..21: mol_type = other RNA
  misc_feature 1..21: note = Description: ZPI siRNA sense strand: ETXS1009; corresponding to SEQ ID NO: 251
  modified_base 1: mod_base = gm
  modified_base 2: mod_base = OTHER; note = 2'O-methyl-adenosine
  modified_base 3: mod_base = um
  modified_base 4: mod_base = gm
  modified_base 5: mod_base = OTHER; note = 2'O-methyl-adenosine
  modified_base 6: mod_base = gm
  modified_base 7: mod_base = OTHER; note = 2'-Fluoro-adenosine
  modified_base 8: mod_base = um
  modified_base 9: mod_base = OTHER; note = 2' Fluoro-uridine
  modified_base 10: mod_base = OTHER; note = 2'-Fluoro-adenosine
  modified_base 11: mod_base = OTHER; note = 2'-Fluoro-adenosine
  modified_base 12: mod_base = OTHER; note = 2' Fluoro-uridine
  modified_base 13: mod_base = cm
  modified_base 14: mod_base = cm
  modified_base 15: mod_base = um
  modified_base 16: mod_base = gm
  modified_base 17: mod_base = OTHER; note = 2'O-methyl-adenosine
  modified_base 18: mod_base = OTHER; note = 2'O-methyl-adenosine
  modified_base 19: mod_base = OTHER; note = 2'O-methyl-adenosine
  modified_base 20: mod_base = cm
  modified_base 21: mod_base = cm
  modified_base 1^2: mod_base = OTHER; note = phosphorothioate linkage
  modified_base 2^3: mod_base = OTHER; note = phosphorothioate linkage
gatgagattaatcctgaaacc

SEQ ID NO: 752 - RNA, 21 nt, synthetic construct
  source 1..21: mol_type = other RNA
  misc_feature 1..21: note = Description: ZPI siRNA sense strand: ETXS1011; corresponding to SEQ ID NO: 252
  modified_base 1: mod_base = cm
  modified_base 2: mod_base = um
  modified_base 3: mod_base = gm
  modified_base 4: mod_base = um
  modified_base 5: mod_base = um
  modified_base 6: mod_base = um
  modified_base 7: mod_base = OTHER; note = 2' Fluoro-guanosine
  modified_base 8: mod_base = OTHER; note = 2'O-methyl-adenosine
  modified_base 9: mod_base = OTHER; note = 2' Fluoro-uridine
  modified_base 10: mod_base = OTHER; note = 2' Fluoro-guanosine
  modified_base 11: mod_base = OTHER; note = 2'-Fluoro-adenosine
  modified_base 12: mod_base = OTHER; note = 2' Fluoro-guanosine
  modified_base 13: mod_base = OTHER; note = 2'O-methyl-adenosine
  modified_base 14: mod_base = um
  modified_base 15: mod_base = um
  modified_base 16: mod_base = OTHER; note = 2'O-methyl-adenosine
  modified_base 17: mod_base = OTHER; note = 2'O-methyl-adenosine
  modified_base 18: mod_base = um
  modified_base 19: mod_base = cm
  modified_base 20: mod_base = cm
  modified_base 21: mod_base = um
  modified_base 1^2: mod_base = OTHER; note = phosphorothioate linkage
  modified_base 2^3: mod_base = OTHER; note = phosphorothioate linkage
ctgtttgatgagattaatcct

SEQ ID NO: 753 - RNA, 21 nt, synthetic construct
  source 1..21: mol_type = other RNA
  misc_feature 1..21: note = Description: ZPI siRNA sense strand: ETXS1013; corresponding to SEQ ID NO: 253
  modified_base 1: mod_base = um
  modified_base 2: mod_base = um
  modified_base 3: mod_base = um
  modified_base 4: mod_base = um
  modified_base 5: mod_base = gm
  modified_base 6: mod_base = cm
  modified_base 7: mod_base = OTHER; note = 2' Fluoro-cytidine
  modified_base 8: mod_base = um
  modified_base 9: mod_base = OTHER; note = 2' Fluoro-uridine
  modified_base 10: mod_base = OTHER; note = 2' Fluoro-cytidine
  modified_base 11: mod_base = OTHER; note = 2'-Fluoro-adenosine
  modified_base 12: mod_base = OTHER; note = 2' Fluoro-uridine
  modified_base 13: mod_base = cm
  modified_base 14: mod_base = cm
  modified_base 15: mod_base = OTHER; note = 2'O-methyl-adenosine
  modified_base 16: mod_base = cm
  modified_base 17: mod_base = OTHER; note = 2'O-methyl-adenosine
  modified_base 18: mod_base = OTHER; note = 2'O-methyl-adenosine
  modified_base 19: mod_base = gm
  modified_base 20: mod_base = gm
  modified_base 21: mod_base = OTHER; note = 2'O-methyl-adenosine
  modified_base 1^2: mod_base = OTHER; note = phosphorothioate linkage
  modified_base 2^3: mod_base = OTHER; note = phosphorothioate linkage
ttttgccttcatccacaagga

SEQ ID NO: 754 - RNA, 21 nt, synthetic construct
  source 1..21: mol_type = other RNA
  misc_feature 1..21: note = Description: ZPI siRNA sense strand: ETXS1015; corresponding to SEQ ID NO: 254
  modified_base 1: mod_base = cm
  modified_base 2: mod_base = gm
  modified_base 3: mod_base = OTHER; note = 2'O-methyl-adenosine
  modified_base 4: mod_base = OTHER; note = 2'O-methyl-adenosine
  modified_base 5: mod_base = OTHER; note = 2'O-methyl-adenosine
  modified_base 6: mod_base = gm
  modified_base 7: mod_base = OTHER; note = 2'-Fluoro-adenosine
  modified_base 8: mod_base = um
  modified_base 9: mod_base = OTHER; note = 2' Fluoro-cytidine
  modified_base 10: mod_base = OTHER; note = 2' Fluoro-uridine
  modified_base 11: mod_base = OTHER; note = 2' Fluoro-cytidine
  modified_base 12: mod_base = OTHER; note = 2' Fluoro-cytidine
  modified_base 13: mod_base = OTHER; note = 2'O-methyl-adenosine
  modified_base 14: mod_base = um
  modified_base 15: mod_base = gm
  modified_base 16: mod_base = OTHER; note = 2'O-methyl-adenosine
  modified_base 17: mod_base = gm
  modified_base 18: mod_base = gm
  modified_base 19: mod_base = cm
  modified_base 20: mod_base = OTHER; note = 2'O-methyl-adenosine
  modified_base 21: mod_base = cm
  modified_base 1^2: mod_base = OTHER; note = phosphorothioate linkage
  modified_base 2^3: mod_base = OTHER; note = phosphorothioate linkage
cgaaagatctccatgaggcac

SEQ ID NO: 755 - RNA, 21 nt, synthetic construct
  source 1..21: mol_type = other RNA
  misc_feature 1..21: note = Description: ZPI siRNA sense strand: ETXS1017; corresponding to SEQ ID NO: 255
  modified_base 1: mod_base = um
  modified_base 2: mod_base = gm
  modified_base 3: mod_base = cm
  modified_base 4: mod_base = um
  modified_base 5: mod_base = gm
  modified_base 6: mod_base = gm
  modified_base 7: mod_base = OTHER; note = 2' Fluoro-uridine
  modified_base 8: mod_base = gm
  modified_base 9: mod_base = OTHER; note = 2' Fluoro-guanosine
  modified_base 10: mod_base = OTHER; note = 2' Fluoro-uridine
  modified_base 11: mod_base = OTHER; note = 2' Fluoro-cytidine
  modified_base 12: mod_base = OTHER; note = 2' Fluoro-cytidine
  modified_base 13: mod_base = um
  modified_base 14: mod_base = cm
  modified_base 15: mod_base = OTHER; note = 2'O-methyl-adenosine
  modified_base 16: mod_base = um
  modified_base 17: mod_base = gm
  modified_base 18: mod_base = gm
  modified_base 19: mod_base = OTHER; note = 2'O-methyl-adenosine
  modified_base 20: mod_base = gm
  modified_base 21: mod_base = OTHER; note = 2'O-methyl-adenosine
  modified_base 1^2: mod_base = OTHER; note = phosphorothioate linkage
  modified_base 2^3: mod_base = OTHER; note = phosphorothioate linkage
tgctggtggtcctcatggaga

SEQ ID NO: 756 - RNA, 21 nt, synthetic construct
  source 1..21: mol_type = other RNA
  misc_feature 1..21: note = Description: ZPI siRNA sense strand: ETXS1019; corresponding to SEQ ID NO: 256
  modified_base 1: mod_base = cm
  modified_base 2: mod_base = cm
  modified_base 3: mod_base = um
  modified_base 4: mod_base = um
  modified_base 5: mod_base = cm
  modified_base 6: mod_base = OTHER; note = 2'O-methyl-adenosine
  modified_base 7: mod_base = OTHER; note = 2' Fluoro-uridine
  modified_base 8: mod_base = cm
  modified_base 9: mod_base = OTHER; note = 2' Fluoro-cytidine
  modified_base 10: mod_base = OTHER; note = 2'-Fluoro-adenosine
  modified_base 11: mod_base = OTHER; note = 2' Fluoro-cytidine
  modified_base 12: mod_base = OTHER; note = 2'-Fluoro-adenosine
  modified_base 13: mod_base = OTHER; note = 2'O-methyl-adenosine
  modified_base 14: mod_base = gm
  modified_base 15: mod_base = gm
  modified_base 16: mod_base = OTHER; note = 2'O-methyl-adenosine
  modified_base 17: mod_base = um
  modified_base 18: mod_base = um
  modified_base 19: mod_base = um
  modified_base 20: mod_base = um
  modified_base 21: mod_base = gm
  modified_base 1^2: mod_base = OTHER; note = phosphorothioate linkage
  modified_base 2^3: mod_base = OTHER; note = phosphorothioate linkage
ccttcatccacaaggattttg

SEQ ID NO: 757 - RNA, 21 nt, synthetic construct
  source 1..21: mol_type = other RNA
  misc_feature 1..21: note = Description: ZPI siRNA sense strand: ETXS1021; corresponding to SEQ ID NO: 257
  modified_base 1: mod_base = gm
  modified_base 2: mod_base = OTHER; note = 2'O-methyl-adenosine
  modified_base 3: mod_base = OTHER; note = 2'O-methyl-adenosine
  modified_base 4: mod_base = OTHER; note = 2'O-methyl-adenosine
  modified_base 5: mod_base = gm
  modified_base 6: mod_base = OTHER; note = 2'O-methyl-adenosine
  modified_base 7: mod_base = OTHER; note = 2' Fluoro-uridine
  modified_base 8: mod_base = cm
  modified_base 9: mod_base = OTHER; note = 2' Fluoro-uridine
  modified_base 10: mod_base = OTHER; note = 2' Fluoro-cytidine
  modified_base 11: mod_base = OTHER; note = 2' Fluoro-cytidine
  modified_base 12: mod_base = OTHER; note = 2'-Fluoro-adenosine
  modified_base 13: mod_base = um
  modified_base 14: mod_base = gm
  modified_base 15: mod_base = OTHER; note = 2'O-methyl-adenosine
  modified_base 16: mod_base = gm
  modified_base 17: mod_base = gm
  modified_base 18: mod_base = cm
  modified_base 19: mod_base = OTHER; note = 2'O-methyl-adenosine
  modified_base 20: mod_base = cm
  modified_base 21: mod_base = gm
  modified_base 1^2: mod_base = OTHER; note = phosphorothioate linkage
  modified_base 2^3: mod_base = OTHER; note = phosphorothioate linkage
gaaagatctccatgaggcacg

SEQ ID NO: 758 - RNA, 21 nt, synthetic construct
  source 1..21: mol_type = other RNA
  misc_feature 1..21: note = Description: ZPI siRNA sense strand: ETXS1023; corresponding to SEQ ID NO: 258
  modified_base 1: mod_base = um
  modified_base 2: mod_base = um
  modified_base 3: mod_base = cm
  modified_base 4: mod_base = OTHER; note = 2'O-methyl-adenosine
  modified_base 5: mod_base = um
  modified_base 6: mod_base = cm
  modified_base 7: mod_base = OTHER; note = 2' Fluoro-cytidine
  modified_base 8: mod_base = OTHER; note = 2'O-methyl-adenosine
  modified_base 9: mod_base = OTHER; note = 2' Fluoro-cytidine
  modified_base 10: mod_base = OTHER; note = 2'-Fluoro-adenosine
  modified_base 11: mod_base = OTHER; note = 2'-Fluoro-adenosine
  modified_base 12: mod_base = OTHER; note = 2' Fluoro-guanosine
  modified_base 13: mod_base = gm
  modified_base 14: mod_base = OTHER; note = 2'O-methyl-adenosine
  modified_base 15: mod_base = um
  modified_base 16: mod_base = um
  modified_base 17: mod_base = um
  modified_base 18: mod_base = um
  modified_base 19: mod_base = gm
  modified_base 20: mod_base = OTHER; note = 2'O-methyl-adenosine
  modified_base 21: mod_base = um
  modified_base 1^2: mod_base = OTHER; note = phosphorothioate linkage
  modified_base 2^3: mod_base = OTHER; note = phosphorothioate linkage
ttcatccacaaggattttgat

SEQ ID NO: 759 - RNA, 21 nt, synthetic construct
  source 1..21: mol_type = other RNA
  misc_feature 1..21: note = Description: ZPI siRNA sense strand: ETXS1025; corresponding to SEQ ID NO: 259
  modified_base 1: mod_base = um
  modified_base 2: mod_base = um
  modified_base 3: mod_base = um
  modified_base 4: mod_base = gm
  modified_base 5: mod_base = OTHER; note = 2'O-methyl-adenosine
  modified_base 6: mod_base = um
  modified_base 7: mod_base = OTHER; note = 2' Fluoro-guanosine
  modified_base 8: mod_base = OTHER; note = 2'O-methyl-adenosine
  modified_base 9: mod_base = OTHER; note = 2' Fluoro-guanosine
  modified_base 10: mod_base = OTHER; note = 2'-Fluoro-adenosine
  modified_base 11: mod_base = OTHER; note = 2' Fluoro-uridine
  modified_base 12: mod_base = OTHER; note = 2' Fluoro-uridine
  modified_base 13: mod_base = OTHER; note = 2'O-methyl-adenosine
  modified_base 14: mod_base = OTHER; note = 2'O-methyl-adenosine
  modified_base 15: mod_base = um
  modified_base 16: mod_base = cm
  modified_base 17: mod_base = cm
  modified_base 18: mod_base = um
  modified_base 19: mod_base = gm
  modified_base 20: mod_base = OTHER; note = 2'O-methyl-adenosine
  modified_base 21: mod_base = OTHER; note = 2'O-methyl-adenosine
  modified_base 1^2: mod_base = OTHER; note = phosphorothioate linkage
  modified_base 2^3: mod_base = OTHER; note = phosphorothioate linkage
tttgatgagattaatcctgaa

SEQ ID NO: 760 - RNA, 21 nt, synthetic construct
  source 1..21: mol_type = other RNA
  misc_feature 1..21: note = Description: ZPI siRNA sense strand: ETXS1027; corresponding to SEQ ID NO: 260
  modified_base 1: mod_base = um
  modified_base 2: mod_base = um
  modified_base 3: mod_base = gm
  modified_base 4: mod_base = cm
  modified_base 5: mod_base = cm
  modified_base 6: mod_base = um
  modified_base 7: mod_base = OTHER; note = 2' Fluoro-uridine
  modified_base 8: mod_base = cm
  modified_base 9: mod_base = OTHER; note = 2'-Fluoro-adenosine
  modified_base 10: mod_base = OTHER; note = 2' Fluoro-uridine
  modified_base 11: mod_base = OTHER; note = 2' Fluoro-cytidine
  modified_base 12: mod_base = OTHER; note = 2' Fluoro-cytidine
  modified_base 13: mod_base = OTHER; note = 2'O-methyl-adenosine
  modified_base 14: mod_base = cm
  modified_base 15: mod_base = OTHER; note = 2'O-methyl-adenosine
  modified_base 16: mod_base = OTHER; note = 2'O-methyl-adenosine
  modified_base 17: mod_base = gm
  modified_base 18: mod_base = gm
  modified_base 19: mod_base = OTHER; note = 2'O-methyl-adenosine
  modified_base 20: mod_base = um
  modified_base 21: mod_base = um
  modified_base 1^2: mod_base = OTHER; note = phosphorothioate linkage
  modified_base 2^3: mod_base = OTHER; note = phosphorothioate linkage
ttgccttcatccacaaggatt

SEQ ID NO: 761 - RNA, 21 nt, synthetic construct
  source 1..21: mol_type = other RNA
  misc_feature 1..21: note = Description: ZPI siRNA sense strand: ETXS1029; corresponding to SEQ ID NO: 261
  modified_base 1: mod_base = gm
  modified_base 2: mod_base = OTHER; note = 2'O-methyl-adenosine
  modified_base 3: mod_base = um
  modified_base 4: mod_base = cm
  modified_base 5: mod_base = um
  modified_base 6: mod_base = cm
  modified_base 7: mod_base = OTHER; note = 2' Fluoro-cytidine
  modified_base 8: mod_base = OTHER; note = 2'O-methyl-adenosine
  modified_base 9: mod_base = OTHER; note = 2' Fluoro-uridine
  modified_base 10: mod_base = OTHER; note = 2' Fluoro-guanosine
  modified_base 11: mod_base = OTHER; note = 2'-Fluoro-adenosine
  modified_base 12: mod_base = OTHER; note = 2' Fluoro-guanosine
  modified_base 13: mod_base = gm
  modified_base 14: mod_base = cm
  modified_base 15: mod_base = OTHER; note = 2'O-methyl-adenosine
  modified_base 16: mod_base = cm
  modified_base 17: mod_base = gm
  modified_base 18: mod_base = OTHER; note = 2'O-methyl-adenosine
  modified_base 19: mod_base = um
  modified_base 20: mod_base = gm
  modified_base 21: mod_base = gm
  modified_base 1^2: mod_base = OTHER; note = phosphorothioate linkage
  modified_base 2^3: mod_base = OTHER; note = phosphorothioate linkage
gatctccatgaggcacgatgg

SEQ ID NO: 762 - RNA, 23 nt, synthetic construct
  source 1..23: mol_type = other RNA
  misc_feature 1..23: note = Antisense: ETXS1032; corresponding to SEQ ID NO: 144
  modified_base 1: mod_base = OTHER; note = 2'O-methyl-adenosine
  modified_base 2: mod_base = OTHER; note = 2'Fluoro-adenosine
  modified_base 3: mod_base = OTHER; note = 2'O-methyl-adenosine
  modified_base 4: mod_base = OTHER; note = 2'Fluoro-adenosine
  modified_base 5: mod_base = um
  modified_base 6: mod_base = OTHER; note = 2' Fluoro-cytidine
  modified_base 7: mod_base = cm
  modified_base 8: mod_base = um
  modified_base 9: mod_base = um
  modified_base 10: mod_base = gm
  modified_base 11: mod_base = um
  modified_base 12: mod_base = gm
  modified_base 13: mod_base = gm
  modified_base 14: mod_base = OTHER; note = 2'Fluoro-adenosine
  modified_base 15: mod_base = um
  modified_base 16: mod_base = OTHER; note = 2' Fluoro-guanosine
  modified_base 17: mod_base = OTHER; note = 2'O-methyl-adenosine
  modified_base 18: mod_base = OTHER; note = 2'O-methyl-adenosine
  modified_base 19: mod_base = gm
  modified_base 20: mod_base = gm
  modified_base 21: mod_base = cm
  modified_base 22: mod_base = OTHER; note = 2'O-methyl-adenosine
  modified_base 23: mod_base = OTHER; note = 2'O-methyl-adenosine
  modified_base 1^2: mod_base = OTHER; note = phosphorothioate linkage
  modified_base 2^3: mod_base = OTHER; note = phosphorothioate linkage
  modified_base 21^22: mod_base = OTHER; note = phosphorothioate linkage
  modified_base 22^23: mod_base = OTHER; note = phosphorothioate linkage
aaaatccttgtggatgaaggcaa

SEQ ID NO: 763 - RNA, 23 nt, synthetic construct
  source 1..23: mol_type = other RNA
  misc_feature 1..23: note = Antisense: ETXS1034; corresponding to SEQ ID NO: 144
  modified_base 1: mod_base = OTHER; note = 2'O-methyl-adenosine
  modified_base 2: mod_base = OTHER; note = 2'Fluoro-adenosine
  modified_base 3: mod_base = OTHER; note = 2'O-methyl-adenosine
  modified_base 4: mod_base = OTHER; note = 2'O-methyl-adenosine
  modified_base 5: mod_base = um
  modified_base 6: mod_base = OTHER; note = 2' Fluoro-cytidine
  modified_base 7: mod_base = cm
  modified_base 8: mod_base = OTHER; note = 2' Fluoro-uridine
  modified_base 9: mod_base = um
  modified_base 10: mod_base = gm
  modified_base 11: mod_base = um
  modified_base 12: mod_base = gm
  modified_base 13: mod_base = gm
  modified_base 14: mod_base = OTHER; note = 2'Fluoro-adenosine
  modified_base 15: mod_base = um
  modified_base 16: mod_base = OTHER; note = 2' Fluoro-guanosine
  modified_base 17: mod_base = OTHER; note = 2'O-methyl-adenosine
  modified_base 18: mod_base = OTHER; note = 2'O-methyl-adenosine
  modified_base 19: mod_base = gm
  modified_base 20: mod_base = gm
  modified_base 21: mod_base = cm
  modified_base 22: mod_base = OTHER; note = 2'O-methyl-adenosine
  modified_base 23: mod_base = OTHER; note = 2'O-methyl-adenosine
  modified_base 1^2: mod_base = OTHER; note = phosphorothioate linkage
  modified_base 2^3: mod_base = OTHER; note = phosphorothioate linkage
  modified_base 21^22: mod_base = OTHER; note = phosphorothioate linkage
  modified_base 22^23: mod_base = OTHER; note = phosphorothioate linkage
aaaatccttgtggatgaaggcaa

SEQ ID NO: 764 - RNA, 23 nt, synthetic construct
  source 1..23: mol_type = other RNA
  misc_feature 1..23: note = Antisense: ETXS1036; corresponding to SEQ ID NO: 145
  modified_base 1: mod_base = cm
  modified_base 2: mod_base = OTHER; note = 2'Fluoro-adenosine
  modified_base 3: mod_base = um
  modified_base 4: mod_base = OTHER; note = 2' Fluoro-guanosine
  modified_base 5: mod_base = gm
  modified_base 6: mod_base = OTHER; note = 2' Fluoro-uridine
  modified_base 7: mod_base = gm
  modified_base 8: mod_base = gm
  modified_base 9: mod_base = cm
  modified_base 10: mod_base = OTHER; note = 2'O-methyl-adenosine
  modified_base 11: mod_base = um
  modified_base 12: mod_base = um
  modified_base 13: mod_base = um
  modified_base 14: mod_base = OTHER; note = 2' Fluoro-cytidine
  modified_base 15: mod_base = cm
  modified_base 16: mod_base = OTHER; note = 2' Fluoro-uridine
  modified_base 17: mod_base = um
  modified_base 18: mod_base = gm
  modified_base 19: mod_base = gm
  modified_base 20: mod_base = um
  modified_base 21: mod_base = OTHER; note = 2'O-methyl-adenosine
  modified_base 22: mod_base = gm
  modified_base 23: mod_base = gm
  modified_base 1^2: mod_base = OTHER; note = phosphorothioate linkage
  modified_base 2^3: mod_base = OTHER; note = phosphorothioate linkage
  modified_base 21^22: mod_base = OTHER; note = phosphorothioate linkage
  modified_base 22^23: mod_base = OTHER; note = phosphorothioate linkage
catggtggcatttccttggtagg

SEQ ID NO: 765 - RNA, 23 nt, synthetic construct
  source 1..23: mol_type = other RNA
  misc_feature 1..23: note = Antisense: ETXS1038; corresponding to SEQ ID NO: 145
  modified_base 1: mod_base = cm
  modified_base 2: mod_base = OTHER; note = 2'Fluoro-adenosine
  modified_base 3: mod_base = um
  modified_base 4: mod_base = gm
  modified_base 5: mod_base = gm
  modified_base 6: mod_base = OTHER; note = 2' Fluoro-uridine
  modified_base 7: mod_base = gm
  modified_base 8: mod_base = OTHER; note = 2' Fluoro-guanosine
  modified_base 9: mod_base = cm
  modified_base 10: mod_base = OTHER; note = 2'O-methyl-adenosine
  modified_base 11: mod_base = um
  modified_base 12: mod_base = um
  modified_base 13: mod_base = um
  modified_base 14: mod_base = OTHER; note = 2' Fluoro-cytidine
  modified_base 15: mod_base = cm
  modified_base 16: mod_base = OTHER; note = 2' Fluoro-uridine
  modified_base 17: mod_base = um
  modified_base 18: mod_base = gm
  modified_base 19: mod_base = gm
  modified_base 20: mod_base = um
  modified_base 21: mod_base = OTHER; note = 2'O-methyl-adenosine
  modified_base 22: mod_base = gm
  modified_base 23: mod_base = gm
  modified_base 1^2: mod_base = OTHER; note = phosphorothioate linkage
  modified_base 2^3: mod_base = OTHER; note = phosphorothioate linkage
  modified_base 21^22: mod_base = OTHER; note = phosphorothioate linkage
  modified_base 22^23: mod_base = OTHER; note = phosphorothioate linkage
catggtggcatttccttggtagg

SEQ ID NO: 766 - RNA, 23 nt, synthetic construct
  source 1..23: mol_type = other RNA
  misc_feature 1..23: note = Antisense: ETXS1040; corresponding to SEQ ID NO: 148
  modified_base 1: mod_base = um
  modified_base 2: mod_base = OTHER; note = 2' Fluoro-cytidine
  modified_base 3: mod_base = gm
  modified_base 4: mod_base = OTHER; note = 2' Fluoro-uridine
  modified_base 5: mod_base = gm
  modified_base 6: mod_base = OTHER; note = 2' Fluoro-cytidine
  modified_base 7: mod_base = cm
  modified_base 8: mod_base = um
  modified_base 9: mod_base = cm
  modified_base 10: mod_base = OTHER; note = 2'O-methyl-adenosine
  modified_base 11: mod_base = um
  modified_base 12: mod_base = gm
  modified_base 13: mod_base = gm
  modified_base 14: mod_base = OTHER; note = 2'Fluoro-adenosine
  modified_base 15: mod_base = gm
  modified_base 16: mod_base = OTHER; note = 2'Fluoro-adenosine
  modified_base 17: mod_base = um
  modified_base 18: mod_base = cm
  modified_base 19: mod_base = um
  modified_base 20: mod_base = um
  modified_base 21: mod_base = um
  modified_base 22: mod_base = cm
  modified_base 23: mod_base = gm
  modified_base 1^2: mod_base = OTHER; note = phosphorothioate linkage
  modified_base 2^3: mod_base = OTHER; note = phosphorothioate linkage
  modified_base 21^22: mod_base = OTHER; note = phosphorothioate linkage
  modified_base 22^23: mod_base = OTHER; note = phosphorothioate linkage
tcgtgcctcatggagatctttcg

SEQ ID NO: 767 - RNA, 23 nt, synthetic construct
  source 1..23: mol_type = other RNA
  misc_feature 1..23: note = Antisense: ETXS1042; corresponding to SEQ ID NO: 148
  modified_base 1: mod_base = um
  modified_base 2: mod_base = OTHER; note = 2' Fluoro-cytidine
  modified_base 3: mod_base = gm
  modified_base 4: mod_base = um
  modified_base 5: mod_base = gm
  modified_base 6: mod_base = OTHER; note = 2' Fluoro-cytidine
  modified_base 7: mod_base = cm
  modified_base 8: mod_base = OTHER; note = 2' Fluoro-uridine
  modified_base 9: mod_base = cm
  modified_base 10: mod_base = OTHER; note = 2'O-methyl-adenosine
  modified_base 11: mod_base = um
  modified_base 12: mod_base = gm
  modified_base 13: mod_base = gm
  modified_base 14: mod_base = OTHER; note = 2'Fluoro-adenosine
  modified_base 15: mod_base = gm
  modified_base 16: mod_base = OTHER; note = 2'Fluoro-adenosine
  modified_base 17: mod_base = um
  modified_base 18: mod_base = cm
  modified_base 19: mod_base = um
  modified_base 20: mod_base = um
  modified_base 21: mod_base = um
  modified_base 22: mod_base = cm
  modified_base 23: mod_base = gm
  modified_base 1^2: mod_base = OTHER; note = phosphorothioate linkage
  modified_base 2^3: mod_base = OTHER; note = phosphorothioate linkage
  modified_base 21^22: mod_base = OTHER; note = phosphorothioate linkage
  modified_base 22^23: mod_base = OTHER; note = phosphorothioate linkage
tcgtgcctcatggagatctttcg

SEQ ID NO: 768 - RNA, 23 nt, synthetic construct
  source 1..23: mol_type = other RNA
  misc_feature 1..23: note = Antisense: ETXS1044; corresponding to SEQ ID NO: 165
  modified_base 1: mod_base = OTHER; note = 2'O-methyl-adenosine
  modified_base 2: mod_base = OTHER; note = 2'Fluoro-adenosine
  modified_base 3: mod_base = OTHER; note = 2'O-methyl-adenosine
  modified_base 4: mod_base = OTHER; note = 2' Fluoro-uridine
  modified_base 5: mod_base = um
  modified_base 6: mod_base = OTHER; note = 2' Fluoro-cytidine
  modified_base 7: mod_base = um
  modified_base 8: mod_base = um
  modified_base 9: mod_base = gm
  modified_base 10: mod_base = um
  modified_base 11: mod_base = cm
  modified_base 12: mod_base = OTHER; note = 2'O-methyl-adenosine
  modified_base 13: mod_base = OTHER; note = 2'O-methyl-adenosine
  modified_base 14: mod_base = OTHER; note = 2'Fluoro-adenosine
  modified_base 15: mod_base = gm
  modified_base 16: mod_base = OTHER; note = 2' Fluoro-guanosine
  modified_base 17: mod_base = um
  modified_base 18: mod_base = gm
  modified_base 19: mod_base = gm
  modified_base 20: mod_base = OTHER; note = 2'O-methyl-adenosine
  modified_base 21: mod_base = gm
  modified_base 22: mod_base = gm
  modified_base 23: mod_base = cm
  modified_base 1^2: mod_base = OTHER; note = phosphorothioate linkage
  modified_base 2^3: mod_base = OTHER; note = phosphorothioate linkage
  modified_base 21^22: mod_base = OTHER; note = phosphorothioate linkage
  modified_base 22^23: mod_base = OTHER; note = phosphorothioate linkage
aaattcttgtcaaaggtggaggc

SEQ ID NO: 769 - RNA, 23 nt, synthetic construct
  source 1..23: mol_type = other RNA
  misc_feature 1..23: note = Antisense: ETXS1046; corresponding to SEQ ID NO: 165
  modified_base 1: mod_base = OTHER; note = 2'O-methyl-adenosine
  modified_base 2: mod_base = OTHER; note = 2'Fluoro-adenosine
  modified_base 3: mod_base = OTHER; note = 2'O-methyl-adenosine
  modified_base 4: mod_base = um
  modified_base 5: mod_base = um
  modified_base 6: mod_base = OTHER; note = 2' Fluoro-cytidine
  modified_base 7: mod_base = um
  modified_base 8: mod_base = OTHER; note = 2' Fluoro-uridine
  modified_base 9: mod_base = gm
  modified_base 10: mod_base = um
  modified_base 11: mod_base = cm
  modified_base 12: mod_base = OTHER; note = 2'O-methyl-adenosine
  modified_base 13: mod_base = OTHER; note = 2'O-methyl-adenosine
  modified_base 14: mod_base = OTHER; note = 2'Fluoro-adenosine
  modified_base 15: mod_base = gm
  modified_base 16: mod_base = OTHER; note = 2' Fluoro-guanosine
  modified_base 17: mod_base = um
  modified_base 18: mod_base = gm
  modified_base 19: mod_base = gm
  modified_base 20: mod_base = OTHER; note = 2'O-methyl-adenosine
  modified_base 21: mod_base = gm
  modified_base 22: mod_base = gm
  modified_base 23: mod_base = cm
  modified_base 1^2: mod_base = OTHER; note = phosphorothioate linkage
  modified_base 2^3: mod_base = OTHER; note = phosphorothioate linkage
  modified_base 21^22: mod_base = OTHER; note = phosphorothioate linkage
  modified_base 22^23: mod_base = OTHER; note = phosphorothioate linkage
aaattcttgtcaaaggtggaggc

SEQ ID NO: 770 - RNA, 23 nt, synthetic construct
  source 1..23: mol_type = other RNA
  misc_feature 1..23: note = Antisense: ETXS1048; corresponding to SEQ ID NO: 202
  modified_base 1: mod_base = um
  modified_base 2: mod_base = OTHER; note = 2' Fluoro-guanosine
  modified_base 3: mod_base = um
  modified_base 4: mod_base = OTHER; note = 2' Fluoro-guanosine
  modified_base 5: mod_base = gm
  modified_base 6: mod_base = OTHER; note = 2'Fluoro-adenosine
  modified_base 7: mod_base = um
  modified_base 8: mod_base = gm
  modified_base 9: mod_base = OTHER; note = 2'O-methyl-adenosine
  modified_base 10: mod_base = OTHER; note = 2'O-methyl-adenosine
  modified_base 11: mod_base = gm
  modified_base 12: mod_base = gm
  modified_base 13: mod_base = cm
  modified_base 14: mod_base = OTHER; note = 2'Fluoro-adenosine
  modified_base 15: mod_base = OTHER; note = 2'O-methyl-adenosine
  modified_base 16: mod_base = OTHER; note = 2'Fluoro-adenosine
  modified_base 17: mod_base = OTHER; note = 2'O-methyl-adenosine
  modified_base 18: mod_base = cm
  modified_base 19: mod_base = um
  modified_base 20: mod_base = cm
  modified_base 21: mod_base = cm
  modified_base 22: mod_base = cm
  modified_base 23: mod_base = cm
  modified_base 1^2: mod_base = OTHER; note = phosphorothioate linkage
  modified_base 2^3: mod_base = OTHER; note = phosphorothioate linkage
  modified_base 21^22: mod_base = OTHER; note = phosphorothioate linkage
  modified_base 22^23: mod_base = OTHER; note = phosphorothioate linkage
tgtggatgaaggcaaaactcccc

SEQ ID NO: 771 - RNA, 23 nt, synthetic construct
  source 1..23: mol_type = other RNA
  misc_feature 1..23: note = Antisense: ETXS1050; corresponding to SEQ ID NO: 202
  modified_base 1: mod_base = um
  modified_base 2: mod_base = OTHER; note = 2' Fluoro-guanosine
  modified_base 3: mod_base = um
  modified_base 4: mod_base = gm
  modified_base 5: mod_base = gm
  modified_base 6: mod_base = OTHER; note = 2'Fluoro-adenosine
  modified_base 7: mod_base = um
  modified_base 8: mod_base = OTHER; note = 2' Fluoro-guanosine
  modified_base 9: mod_base = OTHER; note = 2'O-methyl-adenosine
  modified_base 10: mod_base = OTHER; note = 2'O-methyl-adenosine
  modified_base 11: mod_base = gm
  modified_base 12: mod_base = gm
  modified_base 13: mod_base = cm
  modified_base 14: mod_base = OTHER; note = 2'Fluoro-adenosine
  modified_base 15: mod_base = OTHER; note = 2'O-methyl-adenosine
  modified_base 16: mod_base = OTHER; note = 2'Fluoro-adenosine
  modified_base 17: mod_base = OTHER; note = 2'O-methyl-adenosine
  modified_base 18: mod_base = cm
  modified_base 19: mod_base = um
  modified_base 20: mod_base = cm
  modified_base 21: mod_base = cm
  modified_base 22: mod_base = cm
  modified_base 23: mod_base = cm
  modified_base 1^2: mod_base = OTHER; note = phosphorothioate linkage
  modified_base 2^3: mod_base = OTHER; note = phosphorothioate linkage
  modified_base 21^22: mod_base = OTHER; note = phosphorothioate linkage
  modified_base 22^23: mod_base = OTHER; note = phosphorothioate linkage
tgtggatgaaggcaaaactcccc

SEQ ID NO: 772 - RNA, 21 nt, synthetic construct
  source 1..21: mol_type = other RNA
  misc_feature 1..21: note = Description: ZPI siRNA sense strand: ETXS1031; corresponding to SEQ ID NO: 264
  modified_base 1: mod_base = gm
  modified_base 2: mod_base = cm
  modified_base 3: mod_base = cm
  modified_base 4: mod_base = um
  modified_base 5: mod_base = um
  modified_base 6: mod_base = cm
  modified_base 7: mod_base = OTHER; note = 2'-Fluoro-adenosine
  modified_base 8: mod_base = um
  modified_base 9: mod_base = OTHER; note = 2' Fluoro-cytidine
  modified_base 10: mod_base = OTHER; note = 2' Fluoro-cytidine
  modified_base 11: mod_base = OTHER; note = 2'-Fluoro-adenosine
  modified_base 12: mod_base = OTHER; note = 2' Fluoro-cytidine
  modified_base 13: mod_base = OTHER; note = 2'O-methyl-adenosine
  modified_base 14: mod_base = OTHER; note = 2'O-methyl-adenosine
  modified_base 15: mod_base = gm
  modified_base 16: mod_base = gm
  modified_base 17: mod_base = OTHER; note = 2'O-methyl-adenosine
  modified_base 18: mod_base = um
  modified_base 19: mod_base = um
  modified_base 20: mod_base = um
  modified_base 21: mod_base = um
  misc_feature 1: note = inverted abasic nucleoside
  misc_feature 2: note = inverted abasic nucleoside
  modified_base 1^2: mod_base = OTHER; note = phosphorothioate linkage
  modified_base 2^3: mod_base = OTHER; note = phosphorothioate linkage
gccttcatccacaaggatttt

SEQ ID NO: 773 - RNA, 21 nt, synthetic construct
  source 1..21: mol_type = other RNA
  misc_feature 1..21: note = Description: ZPI siRNA sense strand: ETXS1033; corresponding to SEQ ID NO: 264
  modified_base 1: mod_base = gm
  modified_base 2: mod_base = cm
  modified_base 3: mod_base = cm
  modified_base 4: mod_base = um
  modified_base 5: mod_base = um
  modified_base 6: mod_base = cm
  modified_base 7: mod_base = OTHER; note = 2'O-methyl-adenosine
  modified_base 8: mod_base = um
  modified_base 9: mod_base = OTHER; note = 2' Fluoro-cytidine
  modified_base 10: mod_base = OTHER; note = 2' Fluoro-cytidine
  modified_base 11: mod_base = OTHER; note = 2'-Fluoro-adenosine
  modified_base 12: mod_base = cm
  modified_base 13: mod_base = OTHER; note = 2'O-methyl-adenosine
  modified_base 14: mod_base = OTHER; note = 2'O-methyl-adenosine
  modified_base 15: mod_base = gm
  modified_base 16: mod_base = gm
  modified_base 17: mod_base = OTHER; note = 2'O-methyl-adenosine
  modified_base 18: mod_base = um
  modified_base 19: mod_base = um
  modified_base 20: mod_base = um
  modified_base 21: mod_base = um
  misc_feature 1: note = inverted abasic nucleoside
  misc_feature 2: note = inverted abasic nucleoside
  modified_base 1^2: mod_base = OTHER; note = phosphorothioate linkage
  modified_base 2^3: mod_base = OTHER; note = phosphorothioate linkage
gccttcatccacaaggatttt

SEQ ID NO: 774 - RNA, 21 nt, synthetic construct
  source 1..21: mol_type = other RNA
  misc_feature 1..21: note = Description: ZPI siRNA sense strand: ETXS1035; corresponding to SEQ ID NO: 265
  modified_base 1: mod_base = um
  modified_base 2: mod_base = OTHER; note = 2'O-methyl-adenosine
  modified_base 3: mod_base = cm
  modified_base 4: mod_base = cm
  modified_base 5: mod_base = OTHER; note = 2'O-methyl-adenosine
  modified_base 6: mod_base = OTHER; note = 2'O-methyl-adenosine
  modified_base 7: mod_base = OTHER; note = 2' Fluoro-guanosine
  modified_base 8: mod_base = gm
  modified_base 9: mod_base = OTHER; note = 2'-Fluoro-adenosine
  modified_base 10: mod_base = OTHER; note = 2'-Fluoro-adenosine
  modified_base 11: mod_base = OTHER; note = 2'-Fluoro-adenosine
  modified_base 12: mod_base = OTHER; note = 2' Fluoro-uridine
  modified_base 13: mod_base = gm
  modified_base 14: mod_base = cm
  modified_base 15: mod_base = cm
  modified_base 16: mod_base = OTHER; note = 2'O-methyl-adenosine
  modified_base 17: mod_base = cm
  modified_base 18: mod_base = cm
  modified_base 19: mod_base = OTHER; note = 2'O-methyl-adenosine
  modified_base 20: mod_base = um
  modified_base 21: mod_base = gm
  misc_feature 1: note = inverted abasic nucleoside
  misc_feature 2: note = inverted abasic nucleoside
  modified_base 1^2: mod_base = OTHER; note = phosphorothioate linkage
  modified_base 2^3: mod_base = OTHER; note = phosphorothioate linkage
taccaaggaaatgccaccatg

SEQ ID NO: 775 - RNA, 21 nt, synthetic construct
  source 1..21: mol_type = other RNA
  misc_feature 1..21: note = Description: ZPI siRNA sense strand: ETXS1037; corresponding to SEQ ID NO: 265
  modified_base 1: mod_base = um
  modified_base 2: mod_base = OTHER; note = 2'O-methyl-adenosine
  modified_base 3: mod_base = cm
  modified_base 4: mod_base = cm
  modified_base 5: mod_base = OTHER; note = 2'O-methyl-adenosine
  modified_base 6: mod_base = OTHER; note = 2'O-methyl-adenosine
  modified_base 7: mod_base = gm
  modified_base 8: mod_base = gm
  modified_base 9: mod_base = OTHER; note = 2'-Fluoro-adenosine
  modified_base 10: mod_base = OTHER; note = 2'-Fluoro-adenosine
  modified_base 11: mod_base = OTHER; note = 2'-Fluoro-adenosine
  modified_base 12: mod_base = um
  modified_base 13: mod_base = gm
  modified_base 14: mod_base = cm
  modified_base 15: mod_base = cm
  modified_base 16: mod_base = OTHER; note = 2'O-methyl-adenosine
  modified_base 17: mod_base = cm
  modified_base 18: mod_base = cm
  modified_base 19: mod_base = OTHER; note = 2'O-methyl-adenosine
  modified_base 20: mod_base = um
  modified_base 21: mod_base = gm
  misc_feature 1: note = inverted abasic nucleoside
  misc_feature 2: note = inverted abasic nucleoside
  modified_base 1^2: mod_base = OTHER; note = phosphorothioate linkage
  modified_base 2^3: mod_base = OTHER; note = phosphorothioate linkage
taccaaggaaatgccaccatg

SEQ ID NO: 776 - RNA, 21 nt, synthetic construct
  source 1..21: mol_type = other RNA
  misc_feature 1..21: note = Description: ZPI siRNA sense strand: ETXS1039; corresponding to SEQ ID NO: 268
  modified_base 1: mod_base = OTHER; note = 2'O-methyl-adenosine
  modified_base 2: mod_base = OTHER; note = 2'O-methyl-adenosine
  modified_base 3: mod_base = OTHER; note = 2'O-methyl-adenosine
  modified_base 4: mod_base = gm
  modified_base 5: mod_base = OTHER; note = 2'O-methyl-adenosine
  modified_base 6: mod_base = um
  modified_base 7: mod_base = OTHER; note = 2' Fluoro-cytidine
  modified_base 8: mod_base = um
  modified_base 9: mod_base = OTHER; note = 2' Fluoro-cytidine
  modified_base 10: mod_base = OTHER; note = 2' Fluoro-cytidine
  modified_base 11: mod_base = OTHER; note = 2'-Fluoro-adenosine
  modified_base 12: mod_base = OTHER; note = 2' Fluoro-uridine
  modified_base 13: mod_base = gm
  modified_base 14: mod_base = OTHER; note = 2'O-methyl-adenosine
  modified_base 15: mod_base = gm
  modified_base 16: mod_base = gm
  modified_base 17: mod_base = cm
  modified_base 18: mod_base = OTHER; note = 2'O-methyl-adenosine
  modified_base 19: mod_base = cm
  modified_base 20: mod_base = gm
  modified_base 21: mod_base = OTHER; note = 2'O-methyl-adenosine
  misc_feature 1: note = inverted abasic nucleoside
  misc_feature 2: note = inverted abasic nucleoside
  modified_base 1^2: mod_base = OTHER; note = phosphorothioate linkage
  modified_base 2^3: mod_base = OTHER; note = phosphorothioate linkage
aaagatctccatgaggcacga

SEQ ID NO: 777 - RNA, 21 nt, synthetic construct
  source 1..21: mol_type = other RNA
  misc_feature 1..21: note = Description: ZPI siRNA sense strand: ETXS1041; corresponding to SEQ ID NO: 268
  modified_base 1: mod_base = OTHER; note = 2'O-methyl-adenosine
  modified_base 2: mod_base = OTHER; note = 2'O-methyl-adenosine
  modified_base 3: mod_base = OTHER; note = 2'O-methyl-adenosine
  modified_base 4: mod_base = gm
  modified_base 5: mod_base = OTHER; note = 2'O-methyl-adenosine
  modified_base 6: mod_base = um
  modified_base 7: mod_base = cm
  modified_base 8: mod_base = um
  modified_base 9: mod_base = OTHER; note = 2' Fluoro-cytidine
  modified_base 10: mod_base = OTHER; note = 2' Fluoro-cytidine
  modified_base 11: mod_base = OTHER; note = 2'-Fluoro-adenosine
  modified_base 12: mod_base = um
  modified_base 13: mod_base = gm
  modified_base 14: mod_base = OTHER; note = 2'O-methyl-adenosine
  modified_base 15: mod_base = gm
  modified_base 16: mod_base = gm
  modified_base 17: mod_base = cm
  modified_base 18: mod_base = OTHER; note = 2'O-methyl-adenosine
  modified_base 19: mod_base = cm
  modified_base 20: mod_base = gm
  modified_base 21: mod_base = OTHER; note = 2'O-methyl-adenosine
  misc_feature 1: note = inverted abasic nucleoside
  misc_feature 2: note = inverted abasic nucleoside
  modified_base 1^2: mod_base = OTHER; note = phosphorothioate linkage
  modified_base 2^3: mod_base = OTHER; note = phosphorothioate linkage
aaagatctccatgaggcacga

SEQ ID NO: 778 - RNA, 21 nt, synthetic construct
  source 1..21: mol_type = other RNA
  misc_feature 1..21: note = Description: ZPI siRNA sense strand: ETXS1043; corresponding to SEQ ID NO: 285
  modified_base 1: mod_base = cm
  modified_base 2: mod_base = um
  modified_base 3: mod_base = cm
  modified_base 4: mod_base = cm
  modified_base 5: mod_base = OTHER; note = 2'O-methyl-adenosine
  modified_base 6: mod_base = cm
  modified_base 7: mod_base = OTHER; note = 2' Fluoro-cytidine
  modified_base 8: mod_base = um
  modified_base 9: mod_base = OTHER; note = 2' Fluoro-uridine
  modified_base 10: mod_base = OTHER; note = 2' Fluoro-uridine
  modified_base 11: mod_base = OTHER; note = 2' Fluoro-guanosine
  modified_base 12: mod_base = OTHER; note = 2'-Fluoro-adenosine
  modified_base 13: mod_base = cm
  modified_base 14: mod_base = OTHER; note = 2'O-methyl-adenosine
  modified_base 15: mod_base = OTHER; note = 2'O-methyl-adenosine
  modified_base 16: mod_base = gm
  modified_base 17: mod_base = OTHER; note = 2'O-methyl-adenosine
  modified_base 18: mod_base = OTHER; note = 2'O-methyl-adenosine
  modified_base 19: mod_base = um
  modified_base 20: mod_base = um
  modified_base 21: mod_base = um
  misc_feature 1: note = inverted abasic nucleoside
  misc_feature 2: note = inverted abasic nucleoside
  modified_base 1^2: mod_base = OTHER; note = phosphorothioate linkage
  modified_base 2^3: mod_base = OTHER; note = phosphorothioate linkage
ctccacctttgacaagaattt

SEQ ID NO: 779 - RNA, 21 nt, synthetic construct
  source 1..21: mol_type = other RNA
  misc_feature 1..21: note = Description: ZPI siRNA sense strand: ETXS1045; corresponding to SEQ ID NO: 285
  modified_base 1: mod_base = cm
  modified_base 2: mod_base = um
  modified_base 3: mod_base = cm
  modified_base 4: mod_base = cm
  modified_base 5: mod_base = OTHER; note = 2'O-methyl-adenosine
  modified_base 6: mod_base = cm
  modified_base 7: mod_base = cm
  modified_base 8: mod_base = um
  modified_base 9: mod_base = OTHER; note = 2' Fluoro-uridine
  modified_base 10: mod_base = OTHER; note = 2' Fluoro-uridine
  modified_base 11: mod_base = OTHER; note = 2' Fluoro-guanosine
  modified_base 12: mod_base = OTHER; note = 2'O-methyl-adenosine
  modified_base 13: mod_base = cm
  modified_base 14: mod_base = OTHER; note = 2'O-methyl-adenosine
  modified_base 15: mod_base = OTHER; note = 2'O-methyl-adenosine
  modified_base 16: mod_base = gm
  modified_base 17: mod_base = OTHER; note = 2'O-methyl-adenosine
  modified_base 18: mod_base = OTHER; note = 2'O-methyl-adenosine
  modified_base 19: mod_base = um
  modified_base 20: mod_base = um
  modified_base 21: mod_base = um
  misc_feature 1: note = inverted abasic nucleoside
  misc_feature 2: note = inverted abasic nucleoside
  modified_base 1^2: mod_base = OTHER; note = phosphorothioate linkage
  modified_base 2^3: mod_base = OTHER; note = phosphorothioate linkage
ctccacctttgacaagaattt

SEQ ID NO: 780 - RNA, 21 nt, synthetic construct
  source 1..21: mol_type = other RNA
  misc_feature 1..21: note = Description: ZPI siRNA sense strand: ETXS1047; corresponding to SEQ ID NO: 322
  modified_base 1: mod_base = gm
  modified_base 2: mod_base = gm
  modified_base 3: mod_base = OTHER; note = 2'O-methyl-adenosine
  modified_base 4: mod_base = gm
  modified_base 5: mod_base = um
  modified_base 6: mod_base = um
  modified_base 7: mod_base = OTHER; note = 2' Fluoro-uridine
  modified_base 8: mod_base = um
  modified_base 9: mod_base = OTHER; note = 2' Fluoro-guanosine
  modified_base 10: mod_base = OTHER; note = 2' Fluoro-cytidine
  modified_base 11: mod_base = OTHER; note = 2' Fluoro-cytidine
  modified_base 12: mod_base = OTHER; note = 2' Fluoro-uridine
  modified_base 13: mod_base = um
  modified_base 14: mod_base = cm
  modified_base 15: mod_base = OTHER; note = 2'O-methyl-adenosine
  modified_base 16: mod_base = um
  modified_base 17: mod_base = cm
  modified_base 18: mod_base = cm
  modified_base 19: mod_base = OTHER; note = 2'O-methyl-adenosine
  modified_base 20: mod_base = cm
  modified_base 21: mod_base = OTHER; note = 2'O-methyl-adenosine
  misc_feature 1: note = inverted abasic nucleoside
  misc_feature 2: note = inverted abasic nucleoside
  modified_base 1^2: mod_base = OTHER; note = phosphorothioate linkage
  modified_base 2^3: mod_base = OTHER; note = phosphorothioate linkage
ggagttttgccttcatccaca

SEQ ID NO: 781 - RNA, 21 nt, synthetic construct
  source 1..21: mol_type = other RNA
  misc_feature 1..21: note = Description: ZPI siRNA sense strand: ETXS1049; corresponding to SEQ ID NO: 322
  modified_base 1: mod_base = gm
  modified_base 2: mod_base = gm
  modified_base 3: mod_base = OTHER; note = 2'O-methyl-adenosine
  modified_base 4: mod_base = gm
  modified_base 5: mod_base = um
  modified_base 6: mod_base = um
  modified_base 7: mod_base = um
  modified_base 8: mod_base = um
  modified_base 9: mod_base = OTHER; note = 2' Fluoro-guanosine
  modified_base 10: mod_base = OTHER; note = 2' Fluoro-cytidine
  modified_base 11: mod_base = OTHER; note = 2' Fluoro-cytidine
  modified_base 12: mod_base = um
  modified_base 13: mod_base = um
  modified_base 14: mod_base = cm
  modified_base 15: mod_base = OTHER; note = 2'O-methyl-adenosine
  modified_base 16: mod_base = um
  modified_base 17: mod_base = cm
  modified_base 18: mod_base = cm
  modified_base 19: mod_base = OTHER; note = 2'O-methyl-adenosine
  modified_base 20: mod_base = cm
  modified_base 21: mod_base = OTHER; note = 2'O-methyl-adenosine
  misc_feature 1: note = inverted abasic nucleoside
  misc_feature 2: note = inverted abasic nucleoside
  modified_base 1^2: mod_base = OTHER; note = phosphorothioate linkage
  modified_base 2^3: mod_base = OTHER; note = phosphorothioate linkage
ggagttttgccttcatccaca

SEQ ID NO: 782 - RNA, 23 nt, synthetic construct
  source 1..23: mol_type = other RNA
  misc_feature 1..23: note = Antisense: ETXS1051; corresponding to SEQ ID NO: 144
  modified_base 1: mod_base = OTHER; note = 2'O-methyl-adenosine
  modified_base 2: mod_base = OTHER; note = 2'Fluoro-adenosine
  modified_base 3: mod_base = OTHER; note = 2'O-methyl-adenosine
  modified_base 4: mod_base = OTHER; note = 2'O-methyl-adenosine
  modified_base 5: mod_base = um
  modified_base 6: mod_base = OTHER; note = 2' Fluoro-cytidine
  modified_base 7: mod_base = cm
  modified_base 8: mod_base = um
  modified_base 9: mod_base = um
  modified_base 10: mod_base = gm
  modified_base 11: mod_base = um
  modified_base 12: mod_base = gm
  modified_base 13: mod_base = gm
  modified_base 14: mod_base = OTHER; note = 2'Fluoro-adenosine
  modified_base 15: mod_base = um
  modified_base 16: mod_base = OTHER; note = 2' Fluoro-guanosine
  modified_base 17: mod_base = OTHER; note = 2'O-methyl-adenosine
  modified_base 18: mod_base = OTHER; note = 2'Fluoro-adenosine
  modified_base 19: mod_base = gm
  modified_base 20: mod_base = gm
  modified_base 21: mod_base = cm
  modified_base 22: mod_base = OTHER; note = 2'O-methyl-adenosine
  modified_base 23: mod_base = OTHER; note = 2'O-methyl-adenosine
  modified_base 1^2: mod_base = OTHER; note = phosphorothioate linkage
  modified_base 2^3: mod_base = OTHER; note = phosphorothioate linkage
  modified_base 21^22: mod_base = OTHER; note = phosphorothioate linkage
  modified_base 22^23: mod_base = OTHER; note = phosphorothioate linkage
aaaatccttgtggatgaaggcaa

SEQ ID NO: 783 - RNA, 23 nt, synthetic construct
  source 1..23: mol_type = other RNA
  misc_feature 1..23: note = Antisense: ETXS1052; corresponding to SEQ ID NO: 145
  modified_base 1: mod_base = cm
  modified_base 2: mod_base = OTHER; note = 2'Fluoro-adenosine
  modified_base 3: mod_base = um
  modified_base 4: mod_base = gm
  modified_base 5: mod_base = gm
  modified_base 6: mod_base = OTHER; note = 2' Fluoro-uridine
  modified_base 7: mod_base = gm
  modified_base 8: mod_base = gm
  modified_base 9: mod_base = cm
  modified_base 10: mod_base = OTHER; note = 2'O-methyl-adenosine
  modified_base 11: mod_base = um
  modified_base 12: mod_base = um
  modified_base 13: mod_base = um
  modified_base 14: mod_base = OTHER; note = 2' Fluoro-cytidine
  modified_base 15: mod_base = cm
  modified_base 16: mod_base = OTHER; note = 2' Fluoro-uridine
  modified_base 17: mod_base = um
  modified_base 18: mod_base = OTHER; note = 2' Fluoro-guanosine
  modified_base 19: mod_base = gm
  modified_base 20: mod_base = um
  modified_base 21: mod_base = OTHER; note = 2'O-methyl-adenosine
  modified_base 22: mod_base = gm
  modified_base 23: mod_base = gm
  modified_base 1^2: mod_base = OTHER; note = phosphorothioate linkage
  modified_base 2^3: mod_base = OTHER; note = phosphorothioate linkage
  modified_base 21^22: mod_base = OTHER; note = phosphorothioate linkage
  modified_base 22^23: mod_base = OTHER; note = phosphorothioate linkage
catggtggcatttccttggtagg

SEQ ID NO: 784 - RNA, 23 nt, synthetic construct
  source 1..23: mol_type = other RNA
  misc_feature 1..23: note = Antisense: ETXS1053; corresponding to SEQ ID NO: 148
  modified_base 1: mod_base = um
  modified_base 2: mod_base = OTHER; note = 2' Fluoro-cytidine
  modified_base 3: mod_base = gm
  modified_base 4: mod_base = um
  modified_base 5: mod_base = gm
  modified_base 6: mod_base = OTHER; note = 2' Fluoro-cytidine
  modified_base 7: mod_base = cm
  modified_base 8: mod_base = um
  modified_base 9: mod_base = cm
  modified_base 10: mod_base = OTHER; note = 2'O-methyl-adenosine
  modified_base 11: mod_base = um
  modified_base 12: mod_base = gm
  modified_base 13: mod_base = gm
  modified_base 14: mod_base = OTHER; note = 2'Fluoro-adenosine
  modified_base 15: mod_base = gm
  modified_base 16: mod_base = OTHER; note = 2'Fluoro-adenosine
  modified_base 17: mod_base = um
  modified_base 18: mod_base = OTHER; note = 2' Fluoro-cytidine
  modified_base 19: mod_base = um
  modified_base 20: mod_base = um
  modified_base 21: mod_base = um
  modified_base 22: mod_base = cm
  modified_base 23: mod_base = gm
  modified_base 1^2: mod_base = OTHER; note = phosphorothioate linkage
  modified_base 2^3: mod_base = OTHER; note = phosphorothioate linkage
  modified_base 21^22: mod_base = OTHER; note = phosphorothioate linkage
  modified_base 22^23: mod_base = OTHER; note = phosphorothioate linkage
tcgtgcctcatggagatctttcg

SEQ ID NO: 785 - RNA, 23 nt, synthetic construct
  source 1..23: mol_type = other RNA
  misc_feature 1..23: note = Antisense: ETXS1054; corresponding to SEQ ID NO: 165
  modified_base 1: mod_base = OTHER; note = 2'O-methyl-adenosine
  modified_base 2: mod_base = OTHER; note = 2'Fluoro-adenosine
  modified_base 3: mod_base = OTHER; note = 2'O-methyl-adenosine
  modified_base 4: mod_base = um
  modified_base 5: mod_base = um
  modified_base 6: mod_base = OTHER; note = 2' Fluoro-cytidine
  modified_base 7: mod_base = um
  modified_base 8: mod_base = um
  modified_base 9: mod_base = gm
  modified_base 10: mod_base = um
  modified_base 11: mod_base = cm
  modified_base 12: mod_base = OTHER; note = 2'O-methyl-adenosine
  modified_base 13: mod_base = OTHER; note = 2'O-methyl-adenosine
  modified_base 14: mod_base = OTHER; note = 2'Fluoro-adenosine
  modified_base 15: mod_base = gm
  modified_base 16: mod_base = OTHER; note = 2' Fluoro-guanosine
  modified_base 17: mod_base = um
  modified_base 18: mod_base = OTHER; note = 2' Fluoro-guanosine
  modified_base 19: mod_base = gm
  modified_base 20: mod_base = OTHER; note = 2'O-methyl-adenosine
  modified_base 21: mod_base = gm
  modified_base 22: mod_base = gm
  modified_base 23: mod_base = cm
  modified_base 1^2: mod_base = OTHER; note = phosphorothioate linkage
  modified_base 2^3: mod_base = OTHER; note = phosphorothioate linkage
  modified_base 21^22: mod_base = OTHER; note = phosphorothioate linkage
  modified_base 22^23: mod_base = OTHER; note = phosphorothioate linkage
aaattcttgtcaaaggtggaggc

SEQ ID NO: 786 - RNA, 23 nt, synthetic construct
  source 1..23: mol_type = other RNA
  misc_feature 1..23: note = Antisense: ETXS1055; corresponding to SEQ ID NO: 202
  modified_base 1: mod_base = um
  modified_base 2: mod_base = OTHER; note = 2' Fluoro-guanosine
  modified_base 3: mod_base = um
  modified_base 4: mod_base = gm
  modified_base 5: mod_base = gm
  modified_base 6: mod_base = OTHER; note = 2'Fluoro-adenosine
  modified_base 7: mod_base = um
  modified_base 8: mod_base = gm
  modified_base 9: mod_base = OTHER; note = 2'O-methyl-adenosine
  modified_base 10: mod_base = OTHER; note = 2'O-methyl-adenosine
  modified_base 11: mod_base = gm
  modified_base 12: mod_base = gm
  modified_base 13: mod_base = cm
  modified_base 14: mod_base = OTHER; note = 2'Fluoro-adenosine
  modified_base 15: mod_base = OTHER; note = 2'O-methyl-adenosine
  modified_base 16: mod_base = OTHER; note = 2'Fluoro-adenosine
  modified_base 17: mod_base = OTHER; note = 2'O-methyl-adenosine
  modified_base 18: mod_base = OTHER; note = 2' Fluoro-cytidine
  modified_base 19: mod_base = um
  modified_base 20: mod_base = cm
  modified_base 21: mod_base = cm
  modified_base 22: mod_base = cm
  modified_base 23: mod_base = cm
  modified_base 1^2: mod_base = OTHER; note = phosphorothioate linkage
  modified_base 2^3: mod_base = OTHER; note = phosphorothioate linkage
  modified_base 21^22: mod_base = OTHER; note = phosphorothioate linkage
  modified_base 22^23: mod_base = OTHER; note = phosphorothioate linkage
tgtggatgaaggcaaaactcccc

SEQ ID NO: 787 - RNA, 23 nt, synthetic construct
  source 1..23: mol_type = other RNA
  misc_feature 1..23: note = Description: ZPI siRNA antisense strand (unmodified)
aaagtccttgtggatgaaggcaa

SEQ ID NO: 788 - RNA, 23 nt, synthetic construct
  source 1..23: mol_type = other RNA
  misc_feature 1..23: note = Description: ZPI siRNA antisense strand (unmodified)
aacttcttgtcaaaggtggaggc

SEQ ID NO: 789 - RNA, 23 nt, synthetic construct
  source 1..23: mol_type = other RNA
  misc_feature 1..23: note = Description: ZPI siRNA antisense strand (unmodified)
tgtggatgaaggcaaagctaccc

SEQ ID NO: 790 - DNA, 21 bp, synthetic construct
  misc_feature 1..21: note = Description of sequence: Description: ZPI siRNA antisense strand (unmodified)
  source 1..21: mol_type = other DNA
  modified_base 4: mod_base = OTHER; note = uracil
  modified_base 11: mod_base = OTHER; note = uracil
  modified_base 12: mod_base = OTHER; note = uracil
acgtgacacgttcggagaatt

SEQ ID NO: 791 - RNA, 21 nt, synthetic construct
  source 1..21: mol_type = other RNA
  misc_feature 1..21: note = Description: ZPI siRNA sense strand (unmodified)
gccttcatccacaaggacttt

SEQ ID NO: 792 - RNA, 21 nt, synthetic construct
  source 1..21: mol_type = other RNA
  misc_feature 1..21: note = Description: ZPI siRNA sense strand (unmodified)
ctccacctttgacaagaagtt

SEQ ID NO: 793 - RNA, 21 nt, synthetic construct
  source 1..21: mol_type = other RNA
  misc_feature 1..21: note = Description: ZPI siRNA sense strand (unmodified)
gtagctttgccttcatccaca

SEQ ID NO: 794 - DNA, 21 bp, synthetic construct
  misc_feature 1..21: note = Description of sequence: Description: ZPI siRNA sense strand (unmodified)
  source 1..21: mol_type = other DNA
  modified_base 1: mod_base = OTHER; note = uracil
  modified_base 2: mod_base = OTHER; note = uracil
  modified_base 4: mod_base = OTHER; note = uracil
  modified_base 12: mod_base = OTHER; note = uracil
  modified_base 14: mod_base = OTHER; note = uracil
  modified_base 19: mod_base = OTHER; note = uracil
ttctccgaacgtgtcacgttt

SEQ ID NO: 795 - RNA, 23 nt, synthetic construct
  source 1..23: mol_type = other RNA
  misc_feature 1..23: note = Antisense: ETXS2128; corresponding to SEQ ID NO: 787
  modified_base 1: mod_base = OTHER; note = 2'O-methyl-adenosine
  modified_base 2: mod_base = OTHER; note = 2'Fluoro-adenosine
  modified_base 3: mod_base = OTHER; note = 2'O-methyl-adenosine
  modified_base 4: mod_base = gm
  modified_base 5: mod_base = um
  modified_base 6: mod_base = OTHER; note = 2' Fluoro-cytidine
  modified_base 7: mod_base = cm
  modified_base 8: mod_base = OTHER; note = 2' Fluoro-uridine
  modified_base 9: mod_base = OTHER; note = 2' Fluoro-uridine
  modified_base 10: mod_base = gm
  modified_base 11: mod_base = um
  modified_base 12: mod_base = gm
  modified_base 13: mod_base = gm
  modified_base 14: mod_base = OTHER; note = 2'Fluoro-adenosine
  modified_base 15: mod_base = um
  modified_base 16: mod_base = OTHER; note = 2' Fluoro-guanosine
  modified_base 17: mod_base = OTHER; note = 2'O-methyl-adenosine
  modified_base 18: mod_base = OTHER; note = 2'O-methyl-adenosine
  modified_base 19: mod_base = gm
  modified_base 20: mod_base = gm
  modified_base 21: mod_base = cm
  modified_base 22: mod_base = OTHER; note = 2'O-methyl-adenosine
  modified_base 23: mod_base = OTHER; note = 2'O-methyl-adenosine
  modified_base 1^2: mod_base = OTHER; note = phosphorothioate linkage
  modified_base 2^3: mod_base = OTHER; note = phosphorothioate linkage
  modified_base 21^22: mod_base = OTHER; note = phosphorothioate linkage
  modified_base 22^23: mod_base = OTHER; note = phosphorothioate linkage
aaagtccttgtggatgaaggcaa

SEQ ID NO: 796 - RNA, 23 nt, synthetic construct
  source 1..23: mol_type = other RNA
  misc_feature 1..23: note = Antisense: ETXS2144; corresponding to SEQ ID NO: 788
  modified_base 1: mod_base = OTHER; note = 2'O-methyl-adenosine
  modified_base 2: mod_base = OTHER; note = 2'Fluoro-adenosine
  modified_base 3: mod_base = cm
  modified_base 4: mod_base = um
  modified_base 5: mod_base = um
  modified_base 6: mod_base = OTHER; note = 2' Fluoro-cytidine
  modified_base 7: mod_base = um
  modified_base 8: mod_base = OTHER; note = 2' Fluoro-uridine
  modified_base 9: mod_base = OTHER; note = 2' Fluoro-guanosine
  modified_base 10: mod_base = um
  modified_base 11: mod_base = cm
  modified_base 12: mod_base = OTHER; note = 2'O-methyl-adenosine
  modified_base 13: mod_base = OTHER; note = 2'O-methyl-adenosine
  modified_base 14: mod_base = OTHER; note = 2'Fluoro-adenosine
  modified_base 15: mod_base = gm
  modified_base 16: mod_base = OTHER; note = 2' Fluoro-guanosine
  modified_base 17: mod_base = um
  modified_base 18: mod_base = gm
  modified_base 19: mod_base = gm
  modified_base 20: mod_base = OTHER; note = 2'O-methyl-adenosine
  modified_base 21: mod_base = gm
  modified_base 22: mod_base = gm
  modified_base 23: mod_base = cm
  modified_base 1^2: mod_base = OTHER; note = phosphorothioate linkage
  modified_base 2^3: mod_base = OTHER; note = phosphorothioate linkage
  modified_base 21^22: mod_base = OTHER; note = phosphorothioate linkage
  modified_base 22^23: mod_base = OTHER; note = phosphorothioate linkage
aacttcttgtcaaaggtggaggc

SEQ ID NO: 797 - RNA, 23 nt, synthetic construct
  source 1..23: mol_type = other RNA
  misc_feature 1..23: note = Antisense: ETXS2152; corresponding to SEQ ID NO: 789
  modified_base 1: mod_base = um
  modified_base 2: mod_base = OTHER; note = 2' Fluoro-guanosine
  modified_base 3: mod_base = um
  modified_base 4: mod_base = gm
  modified_base 5: mod_base = gm
  modified_base 6: mod_base = OTHER; note = 2'Fluoro-adenosine
  modified_base 7: mod_base = um
  modified_base 8: mod_base = OTHER; note = 2' Fluoro-guanosine
  modified_base 9: mod_base = OTHER; note = 2'Fluoro-adenosine
  modified_base 10: mod_base = OTHER; note = 2'O-methyl-adenosine
  modified_base 11: mod_base = gm
  modified_base 12: mod_base = gm
  modified_base 13: mod_base = cm
  modified_base 14: mod_base = OTHER; note = 2'Fluoro-adenosine
  modified_base 15: mod_base = OTHER; note = 2'O-methyl-adenosine
  modified_base 16: mod_base = OTHER; note = 2'Fluoro-adenosine
  modified_base 17: mod_base = gm
  modified_base 18: mod_base = cm
  modified_base 19: mod_base = um
  modified_base 20: mod_base = OTHER; note = 2'O-methyl-adenosine
  modified_base 21: mod_base = cm
  modified_base 22: mod_base = cm
  modified_base 23: mod_base = cm
  modified_base 1^2: mod_base = OTHER; note = phosphorothioate linkage
  modified_base 2^3: mod_base = OTHER; note = phosphorothioate linkage
  modified_base 21^22: mod_base = OTHER; note = phosphorothioate linkage
  modified_base 22^23: mod_base = OTHER; note = phosphorothioate linkage
tgtggatgaaggcaaagctaccc

SEQ ID NO: 798 - RNA, 21 nt, synthetic construct
  source 1..21: mol_type = other RNA
  misc_feature 1..21: note = Description: ZPI siRNA sense strand: ETXS2127; corresponding to SEQ ID NO: 791
  modified_base 1: mod_base = gm
  modified_base 2: mod_base = cm
  modified_base 3: mod_base = cm
  modified_base 4: mod_base = um
  modified_base 5: mod_base = um
  modified_base 6: mod_base = cm
  modified_base 7: mod_base = OTHER; note = 2'-Fluoro-adenosine
  modified_base 8: mod_base = um
  modified_base 9: mod_base = OTHER; note = 2' Fluoro-cytidine
  modified_base 10: mod_base = OTHER; note = 2' Fluoro-cytidine
  modified_base 11: mod_base = OTHER; note = 2'-Fluoro-adenosine
  modified_base 12: mod_base = cm
  modified_base 13: mod_base = OTHER; note = 2'O-methyl-adenosine
  modified_base 14: mod_base = OTHER; note = 2'O-methyl-adenosine
  modified_base 15: mod_base = gm
  modified_base 16: mod_base = gm
  modified_base 17: mod_base = OTHER; note = 2'O-methyl-adenosine
  modified_base 18: mod_base = cm
  modified_base 19: mod_base = um
  modified_base 20: mod_base = um
  modified_base 21: mod_base = um
  modified_base 1^2: mod_base = OTHER; note = phosphorothioate linkage
  modified_base 2^3: mod_base = OTHER; note = phosphorothioate linkage
gccttcatccacaaggacttt

SEQ ID NO: 799 - RNA, 21 nt, synthetic construct
  source 1..21: mol_type = other RNA
  misc_feature 1..21: note = Description: ZPI siRNA sense strand: ETXS2143; corresponding to SEQ ID NO: 792
  modified_base 1: mod_base = cm
  modified_base 2: mod_base = um
  modified_base 3: mod_base = cm
  modified_base 4: mod_base = cm
  modified_base 5: mod_base = OTHER; note = 2'O-methyl-adenosine
  modified_base 6: mod_base = cm
  modified_base 7: mod_base = OTHER; note = 2' Fluoro-cytidine
  modified_base 8: mod_base = um
  modified_base 9: mod_base = OTHER; note = 2' Fluoro-uridine
  modified_base 10: mod_base = OTHER; note = 2' Fluoro-uridine
  modified_base 11: mod_base = OTHER; note = 2' Fluoro-guanosine
  modified_base 12: mod_base = OTHER; note = 2'O-methyl-adenosine
  modified_base 13: mod_base = cm
  modified_base 14: mod_base = OTHER; note = 2'O-methyl-adenosine
  modified_base 15: mod_base = OTHER; note = 2'O-methyl-adenosine
  modified_base 16: mod_base = gm
  modified_base 17: mod_base = OTHER; note = 2'O-methyl-adenosine
  modified_base 18: mod_base = OTHER; note = 2'O-methyl-adenosine
  modified_base 19: mod_base = gm
  modified_base 20: mod_base = um
  modified_base 21: mod_base = um
  modified_base 1^2: mod_base = OTHER; note = phosphorothioate linkage
  modified_base 2^3: mod_base = OTHER; note = phosphorothioate linkage
ctccacctttgacaagaagtt

SEQ ID NO: 800 - RNA, 21 nt, synthetic construct
  source 1..21: mol_type = other RNA
  misc_feature 1..21: note = Description: ZPI siRNA sense strand: ETXS2151; corresponding to SEQ ID NO: 793
  modified_base 1: mod_base = gm
  modified_base 2: mod_base = um
  modified_base 3: mod_base = OTHER; note = 2'O-methyl-adenosine
  modified_base 4: mod_base = gm
  modified_base 5: mod_base = cm
  modified_base 6: mod_base = um
  modified_base 7: mod_base = OTHER; note = 2' Fluoro-uridine
  modified_base 8: mod_base = um
  modified_base 9: mod_base = OTHER; note = 2' Fluoro-guanosine
  modified_base 10: mod_base = OTHER; note = 2' Fluoro-cytidine
  modified_base 11: mod_base = OTHER; note = 2' Fluoro-cytidine
  modified_base 12: mod_base = um
  modified_base 13: mod_base = um
  modified_base 14: mod_base = cm
  modified_base 15: mod_base = OTHER; note = 2'O-methyl-adenosine
  modified_base 16: mod_base = um
  modified_base 17: mod_base = cm
  modified_base 18: mod_base = cm
  modified_base 19: mod_base = OTHER; note = 2'O-methyl-adenosine
  modified_base 20: mod_base = cm
  modified_base 21: mod_base = OTHER; note = 2'O-methyl-adenosine
  modified_base 1^2: mod_base = OTHER; note = phosphorothioate linkage
  modified_base 2^3: mod_base = OTHER; note = phosphorothioate linkage
gtagctttgccttcatccaca

1. An inhibitor of expression and/or function of ZPI for use in prevention or treatment of a disease related to a disorder of haemostasis, such as haemophilia.

2. The inhibitor of expression and/or function of ZPI of claim 1, wherein said inhibitor is conjugated to one or more ligand moieties.

3. The inhibitor of expression and/or function of ZPI of claim 1 or 2, wherein said inhibitor is an siRNA oligomer.

4. An inhibitor of expression and/or function of ZPI, wherein said inhibitor is conjugated to one or more ligand moieties.

5. An inhibitor according to claim 4, wherein said inhibitor is an siRNA oligomer.

6. An inhibitor of expression and/or function of ZPI, wherein said inhibitor is an siRNA oligomer.

7. An inhibitor according to claim 6, wherein said inhibitor comprises an siRNA oligomer conjugated to one or more ligand moieties.

8. An inhibitor, or an inhibitor for use, according to claim 2, 4, 5 or 7, wherein said one or more ligand moieties comprise one or more GalNAc ligands or comprise one more GalNAc ligand derivatives.

9. An inhibitor, or an inhibitor for use, according to claim 2, 4, 5 or 7 wherein said one or more ligand moieties comprise one or more GalNAc ligand derivatives.

10. An inhibitor, or an inhibitor for use, according to one or more preceding claims, wherein the target of the inhibitor is ZPI.

11. An inhibitor, or inhibitor for use, according to one or more preceding claims, which is an siRNA oligomer having a first and a second strand wherein:
i) the first strand of the siRNA has a length in the range of 15 to 30 nucleosides, preferably 19 to 25 nucleosides, more preferably 23 or 25; even more preferably 23; and/or
ii) the second strand of the siRNA has a length in the range of 15 to 30 nucleosides, preferably 19 to 25 nucleosides, more preferably 21 nucleosides.

12. An inhibitor, or inhibitor for use, according to claim 11, wherein the second sense strand further comprises one or more abasic nucleosides in a terminal region of the second strand, and wherein said abasic nucleoside(s) is/are connected to an adjacent nucleoside through a reversed internucleoside linkage.

13. An inhibitor, or inhibitor for use, according to claim 12, wherein the second strand comprises:
i 2, or more than 2, abasic nucleosides in a terminal region of the second strand; and/or
ii 2, or more than 2, abasic nucleosides in either the 5′ or 3′ terminal region of the second strand; and/or
iii 2, or more than 2, abasic nucleosides in either the 5′ or 3′ terminal region of the second strand, wherein the abasic nucleosides are present in an overhang as herein described; and/or
iv 2, or more than 2, consecutive abasic nucleosides in a terminal region of the second strand, wherein preferably one such abasic nucleoside is a terminal nucleoside; and/or
v 2, or more than 2, consecutive abasic nucleosides in either the 5′ or 3′ terminal region of the second strand, wherein preferably one such abasic nucleoside is a terminal nucleoside in either the 5′ or 3′ terminal region of the second strand; and/or
vi a reversed internucleoside linkage connects at least one abasic nucleoside to an adjacent basic nucleoside in a terminal region of the second strand; and/or
vii a reversed internucleoside linkage connects at least one abasic nucleoside to an adjacent basic nucleoside in either the 5′ or 3′ terminal region of the second strand; and/or
viii an abasic nucleoside as the penultimate nucleoside which is connected via the reversed linkage to the nucleoside which is not the terminal nucleoside (called the antepenultimate nucleoside herein); and/or
ix abasic nucleosides as the 2 terminal nucleosides connected via a 5′-3′ linkage when reading the strand in the direction towards that terminus;
x abasic nucleosides as the 2 terminal nucleosides connected via a 3′-5′ linkage when reading the strand in the direction towards the terminus comprising the terminal nucleosides;
xi abasic nucleosides as the terminal 2 positions, wherein the penultimate nucleoside is connected via the reversed linkage to the antepenultimate nucleoside, and wherein the reversed linkage is a 5-5′ reversed linkage or a 3′-3′ reversed linkage;
xii abasic nucleosides as the terminal 2 positions, wherein the penultimate nucleoside is connected via the reversed linkage to the antepenultimate nucleoside, and wherein either
(1) the reversed linkage is a 5-5′ reversed linkage and the linkage between the terminal and penultimate abasic nucleosides is 3′5′ when reading towards the terminus comprising the terminal and penultimate abasic nucleosides; or
(2) the reversed linkage is a 3-3′ reversed linkage and the linkage between the terminal and penultimate abasic nucleosides is 5′3′ when reading towards the terminus comprising the terminal and penultimate abasic nucleosides.

14. An inhibitor, or inhibitor for use, according claim 12 or 13, wherein the reversed internucleoside linkage is at a terminal region which is distal to the 5′ terminal region of the second strand, or at a terminal region which is distal to the 3′ terminal region of the second strand.

15. An inhibitor, or inhibitor for use, according to any one of claims 12 to 14, wherein the reversed internucleoside linkage is a 3′3 reversed linkage.

16. An inhibitor, or inhibitor for use, according to any one of claims 12 to 14, wherein the reversed internucleoside linkage is a 5′5 reversed linkage.

17. An inhibitor, or inhibitor for use, according to any one of claims 1 to 16, wherein one or more nucleosides on the first strand and/or the second strand is/are modified, to form modified nucleosides.

18. An inhibitor, or inhibitor for use, according to claim 17, wherein the modification is a modification at the 2′-OH group of the ribose sugar, optionally selected from 2′-Me or 2′-F modifications.

19. An inhibitor, or inhibitor for use, according to claim 17 or 18, wherein the first strand comprises a 2′-F at any of position 14, position 2, position 6, or any combination thereof, counting from position 1 of said first strand.

20. An inhibitor, or inhibitor for use, according to any one of claims 17 to 18, wherein the second strand comprises a 2′-F modification at position 7 and/or 9, and/or 11 and/or 13, counting from position 1 of said second strand.

21. An inhibitor, or inhibitor for use, according to any one of claims 17 to 20, wherein the first and second strand each comprise 2′-Me and 2′-F modifications.

22. An inhibitor, or inhibitor for use, according to any one of claims 17 to 21, which is an siRNA, wherein the siRNA comprises at least one thermally destabilizing modification, suitably at one or more of positions 1 to 9 of the first strand counting from position 1 of the first strand, and/or at one or more of positions on the second strand aligned with positions 1 to 9 of the first strand, wherein the destabilizing modification is selected from a modified unlocked nucleic acid (UNA) and a glycol nucleic acid (GNA), preferably a glycol nucleic acid.

23. An inhibitor, or inhibitor for use, according to claim 22, wherein the siRNA comprises at least one thermally destabilizing modification at position 7 of the first strand, counting from position 1 of the first strand.

24. An inhibitor, or inhibitor for use, according to any one of claims 17 to 23, which is an siRNA, wherein the siRNA comprises 3 or more 2′-F modifications at positions 7 to 13 of the second strand, such as 4, 5, 6 or 7 2′-F modifications at positions 7 to 13 of the second strand, counting from position 1 of said second strand

25. An inhibitor, or inhibitor for use, according to any one of claims 17 to 24, which is an siRNA, wherein said second strand comprises at least 3, such as 4, 5 or 6, 2′-Me modifications at positions 1 to 6 of the second strand, counting from position 1 of said second strand.

26. An inhibitor, or inhibitor for use, according to any one of claims 17 to 25, which is an siRNA, wherein said first strand comprises at least 5 2′-Me consecutive modifications at the 3′ terminal region, preferably including the terminal nucleoside at the 3′ terminal region, or at least within 1 or 2 nucleosides from the terminal nucleoside at the 3′ terminal region.

27. An inhibitor, or inhibitor for use, according to any one of claims 17 to 26, which is an siRNA wherein said first strand comprises 7 2′-Me consecutive modifications at the 3′ terminal region, preferably including the terminal nucleoside at the 3′ terminal region.

28. An inhibitor, or inhibitor for use, according to any one of claims 17 to 23, which is an siRNA, wherein said modified nucleosides of said second strand comprise a modification pattern according to any one of the following (5′-3′):
(Me)₈-(F)₃-(Me)₁₀.

29. An inhibitor, or inhibitor for use, according to any one of claims 17 to 23 or 28, which is an siRNA, wherein nucleosides of said first strand comprise a 2′ sugar modification pattern wherein said modifications are selected at least from 2′Me and 2′F sugar modifications, provided that the overall number of 2′F sugar modifications in the first strand does not consist of four, or six, 2′F modifications.

30. An inhibitor, or inhibitor for use, according to any one of claims 17 to 23 or 28 to 29, which is an siRNA, wherein said modifications are selected at least from 2′Me and 2′F sugar modifications, wherein the overall number of 2′F sugar modifications in the first strand consists of three, five or seven 2′F modifications.

31. An inhibitor, or inhibitor for use, according to any one of claims 17 to 30, wherein the siRNA oligomer further comprises one or more phosphorothioate internucleoside linkages.

32. An inhibitor, or inhibitor for use, according to claim 31, wherein said one or more phosphorothioate internucleoside linkages are respectively between at least three consecutive positions in a 5′ or 3′ near terminal region of the second strand, whereby said near terminal region is preferably adjacent said terminal region wherein said one or more abasic nucleosides of said second strand is/are located according to at least claim 12.

33. An inhibitor, or inhibitor for use, according to claim 31 or 32, wherein said one or more phosphorothioate internucleoside linkages are respectively between at least three consecutive positions in a 5′ and/or 3′ terminal region of the first strand, whereby preferably a terminal position at the 5′ and/or 3′ terminal region of said first strand is attached to its adjacent position by a phosphorothioate internucleoside linkage.

34. An inhibitor, or inhibitor for use according to any one of claims 11 to 33, wherein the oligomer is an siRNA and the second strand of the siRNA is conjugated directly or indirectly to one or more ligand moiety(s), wherein said ligand moiety is typically present at a terminal region of the second strand, preferably at the 3′ terminal region thereof.

35. An inhibitor, or inhibitor for use according to claim 34, wherein the ligand moiety comprises
i) one or more GalNAc ligands; and/or
ii) one or more GalNAc ligand derivatives; and/or
iii) one or more GalNAc ligands and/or GalNAc ligand derivatives conjugated to said SiRNA through a linker.

36. An inhibitor, or inhibitor for use according to claim 35, wherein said one or more GalNAc ligands and/or GalNAc ligand derivatives are conjugated directly or indirectly to the 5′ or 3′ terminal region of the second strand of the siRNA oligomer, preferably at the 3′ terminal region thereof.

37. An inhibitor, or inhibitor for use according to claim 35 or 36, wherein the ligand moiety comprises

[chemical structure]

38. An inhibitor, or inhibitor for use according to claim 35 or 36, having the structure: [chemical structure]
wherein:
R₁ at each occurrence is independently selected from the group consisting of hydrogen, methyl and ethyl;
R₂ is selected from the group consisting of hydrogen, hydroxy, —OC₁₋₃alkyl, —C(═O)OC₁₋₃alkyl, halo and nitro;
X₁ and X₂ at each occurrence are independently selected from the group consisting of methylene, oxygen and sulfur;
m is an integer of from 1 to 6;
n is an integer of from 1 to 10;
q, r, s, t, v are independently integers from 0 to 4, with the proviso that:
(i) q and r cannot both be 0 at the same time; and
(ii) s, t and v cannot all be 0 at the same time;
Z is an oligomer

39. An inhibitor, or inhibitor for use according to claim 35 or 36, having the structure [chemical structure]
wherein:
r and s are independently an integer selected from 1 to 16; and
Z is an oligomer.

40. An inhibitor, or inhibitor for use according to one or more preceding claims, formulated as a pharmaceutical composition with an excipient and/or carrier.

41. A pharmaceutical composition comprising an inhibitor according to one or more preceding claims, in combination with a pharmaceutically acceptable excipient or carrier.

42. A pharmaceutical composition comprising an inhibitor according to one or more preceding claims, in combination with a pharmaceutically acceptable excipient or carrier, for use in the treatment of a disease related to a disorder of haemostasis, such as haemophilia.

43. Use of ZPI as a target for identifying one or more therapeutic agents for the treatment of a disease related to a disorder of haemostasis, such as haemophilia.

44. A method of treating or preventing a disease related to a disorder of haemostasis, such as haemophilia, which comprises administering to a patient an inhibitor of ZPI, such as an inhibitor as defined according to one or more preceding claims.

45. ZPI for use as a biomarker of a disease related to a disorder of haemostasis, such as haemophilia.

46. ZPI for use in an in vivo method of predicting susceptibility to a disease related to a disorder of haemostasis, such as haemophilia, typically by monitoring the sequence and/or level of expression and/or function of ZPI in a sample obtained from a patient.

47. A method of predicting susceptibility to a disease related to a disorder of haemostasis, such as haemophilia, and optionally treating a disease related to a disorder of haemostasis, such as haemophilia, in a patient, said method comprising:
(a) obtaining a sample from the patient,
(b) detecting the sequence and/or expression and/or function of ZPI in said sample obtained from the patient,
(c) predicting susceptibility to a disease related to a disorder of haemostasis, such as haemophilia, based on the sequence and/or expression and/or function of ZPI in said sample obtained from the patient,
(d) preferably administering to the diagnosed patient an effective amount of an inhibitor of ZPI.

48. An inhibitor or composition according to any preceding claim, in the preparation of a medicament for use in the treatment of a disease related to a disorder of haemostasis, such as haemophilia.
